United States Patent Application Publication US 2005/0228172 A9 - sequence listing, part 211

SEQ ID NO: 956362 - DNA, 606 bp, Homo sapiens
tcaggtggtgcccacatatcatgcaaaaccatgtgtgaaccaggccctagtcttctcttcctttgtcaactgatcatgggcaacaacctatgaggccatcagtgcagggtgggagagaraaggcagggtggctggagtggagaccatgggcatttgagccactttccttatgtaacttacttgttgccttcaggacctacttgagcctgatcacgtatatataccacttccatttgatgatggaatgctgctgtgcactacccattttatggctaaacgggtcagaaagcacccagttcacgataggcagttcagctctcatggtgacttcatgacccatagtcaaatgttcagtttccaccaaaacccagtaacaggccaagagctgtctctcaaaaggagagtggttatctgcaggagacggcagggccttgatcctaaatcctagaggccttcactgtgattcacctatgggggcctgccaaaggctccaaacagtatccctatctgccactgacacctcaagcacgattgtatctgctgggtcatatggcccaagtggcagagcaacttgcacagcagcctgaaccagttacagagccttct

SEQ ID NO: 956363 - DNA, 622 bp, Homo sapiens; identical to SEQ ID NO: 956355

SEQ ID NO: 956364 - DNA, 455 bp, Homo sapiens
ccctaagacatatgatcatcagatttttcaaggttgaaatgaaaggaaaaaaaatgttaaagacagctagagaaaaagagcaagtcacctataaagggaamcctatcaggctaagagtggacctctcagcagaagagattggggacctatattcaacattcttaaagaaaaatgtctaaaaccaagaatttgatatccagccaacctaagtttcctaaacggaggagaaacacagcctgtttcagataagcaaatgttgagggggttcattactaccacacatgccttacaagaaattgggaaaggagcaccaaatatagaaagaaaagactgttaccagccaatacaaaaacacacttacatacacagaccagtgacactgtaaagcaaccacacaaacaagctgacataataaccagctaacaatacaatgacgggatcaaatccacacatat

SEQ ID NO: 956365 - DNA, 562 bp, Homo sapiens
agtaaggacagaatgagaagagagatgtgggtggctaaaggctagaggcatttccagttacataccttgcaaaatgttctgaaaaaccattagcctatggcagtttttcttgtcaggccatttgcattgacccatagacattggttcagtgccttcctgccttgactgtttctttatctttctcttaaacacacatgcacaaatatgtacagcagcccagaaacataagcatcctcgaatggctttgggcagggatggggtgatgggaacacacagataagaaatcaggcccaagcactggtgccttgtgacatcagttggacagtcttgagttttcagtatggtctaaaaccttgtcttcagttctccagggtttataggccttttctgccttaatgccttgggcctggagttattgtgtgattttaattctgaactctaaaacacattgactgactgcctggtttgtcctcctttttgcttgaaccagggcaggatggatagctgttgtgcatttctcttraccgggttatttctaggtgtcacggtcgagagtttaagt

SEQ ID NO: 956366 - DNA, 643 bp, Homo sapiens
aagtggctgttttcaggtcttcaacattggttagccgcagttgggaaatcttcttccccgtgcccctgagtgaattatcacgttatcgagtcggagcttcggggtggccaagccggagctccgccgctcctcctctgataatccatcacccaccgagtgggttattaagacattctctgcctgggcgtgtgcatcaatctgcggctcaaccatcctcccaagggagcacgctggaggggttcctggaattcccatcccccagatgtttgagccacacaaccctcgccacttcctcagcccaccaaggggtcctgtgtctgatcaccagtccatcttcatcccctatgtaccccctccccaccattgccccctgcacccatcctagccattcaagtaacaatttcttccaacactagccctcctgagcacgcactcataggaaagcccacccccctccgaccccatcttctccttgtccctctgcaaccaggtcacccctgctgccctcagcctctgggcagaggggaagattagattgcacatraataagcaatattcacttggcgctgacagcctagagtaaatcccttgagctgttgtacaggagcagtacaatatttcccatctcctcttccctccatcg

SEQ ID NO: 956367 - DNA, 602 bp, Homo sapiens
cctcttctcttcagtaaatttctgatagtcccagcttgcctctaattgttcagtctgacaatatttccaattcaatggatttcctgtttcctccaaaattgaaacctggagctgactctgttagctactttggtccagaatgggcatttttgagcttgtgagtttttgagagtgcagctgggcggtattccttaggtatccatttccttaccactgacactaacaccagcccccagtaacacaacaggcacctctaagatcgtcttacttaggcctaagcaagggacccagttaattctccttaatcctccatttatggatcactagcccttccatgcaggagaacacctagcatggtgtattagtccattttcacagtgctataaagaaatgcccaagactgggtaatttataaggaaaagaggtttaattgactcagagttccgcatggctggggagacctcaggaaacttataaccatggtggaagaggaagcaggcacctcttacatgaggygagagagtgtggaaactgtcacttatgaaaccatcagctctcgtgaaaactcactatcacgagaacagcatgggggaaactgcccc

SEQ ID NO: 956368 - DNA, 473 bp, Homo sapiens
aaattatcaacaacatcacaactagaggagctagagaaacamggaccaactaactctaaagctagcagaagacaagaaatgacaaaaatcatagcttaactgaagtaaattaaaacatgaaaaactacagaaatatcaatgaaccaggagctggtttttgaagaaattaagaaaagcagcccactagctagactaataaagaaaaaagagaaattccaaataaacactatcagaagtgacaaaggggaggttaccactgactccacagaaatacaaaaaccctcagagactattatgaaaacctgtatgcacataagctagaaaacctagaagaaatggataaattccttgaaacatacaacctccaagactgaatcaggaagatattgagtccctgaacagaacaataatgagttctgagattgaatcagtaataaaaagcctaccaactagaaaaaaaccagtaccagata

SEQ ID NO: 956369 - DNA, 647 bp, Homo sapiens
cagctggagccagaaatgggaagaaatgtaamcataacagtcttgttctcggatgcatggccggtcaatatgccaaacactgggttgcagcagaggaatgggtttcattgtaaggaaactgaatgaggaggtaggaggaaccctcaaatctagctccccaaggagtttgaggctagggattttaaggggtttggaagagtagtgggccaaggtataggaattattgattggtcaaagagtatagggtgaagtcatgggatcgagagatgaagattttaaataactgtgattaacatgctaagggctttactggaaaaagtgggggacaggaggacagctgagtaatttaattagagaggtggaaactacaaaaacaatcaaaagctccatccatgttgctgcaaaggtatgatttcattcttttttatggctgcatagtattccatggtgtacatgtaacatattccctttattcaatccactgtggataggcacctaggttgattccatgtatttgttattgtgaatagcatggtgatgaacatttgcatgtatgtgtctttttggtataatgatctatttttctttgggtatatgcctagaaatggggttgctgggtcaaatggtagctctgttttaagttcttt

SEQ ID NO: 956370 - DNA, 647 bp, Homo sapiens
cagctggagccagaaatgggaagaaatgtaaccataacagtcttgttctcggatgcatggccrgtcaatatgccaaacactgggttgcagcagaggaatgggtttcattgtaaggaaactgaatgaggaggtaggaggaaccctcaaatctagctccccaaggagtttgaggctagggattttaaggggtttggaagagtagtgggccaaggtataggaattattgattggtcaaagagtatagggtgaagtcatgggatcgagagatgaagattttaaataactgtgattaacatgctaagggctttactggaaaaagtgggggacaggaggacagctgagtaatttaattagagaggtggaaactacaaaaacaatcaaaagctccatccatgttgctgcaaaggtatgatttcattcttttttatggctgcatagtattccatggtgtacatgtaacatattccctttattcaatccactgtggataggcacctaggttgattccatgtatttgttattgtgaatagcatggtgatgaacatttgcatgtatgtgtctttttggtataatgatctatttttctttgggtatatgcctagaaatggggttgctgggtcaaatggtagctctgttttaagttcttt

SEQ ID NO: 956371 - DNA, 627 bp, Homo sapiens
caaccatcaaaggcaaggtgggaatatctactgtaatggacagcagaggcaaagtcacaatcagaatagtctggtgtagagctctggcattggctaattaatcatggtattcctagaagtgaaattgatagggagcctactgcattcctacttaatttatacaagtggaaaacttctaggtcgaatagacaaaaggctaatttgaattataaaaacagagaatcacggcccctcaatttccagacttgagccagtttacggacccagaatcccttgaataaaggggaggtcgggtctccttgagggaggaccccactacattaccaacaatttatgcagtggatctttctcccatccttccccagagagacctccagccttttaccagtgtgactgtgcattgcagaaagggaaatgaccagacatttgggggaccactggacgctggctctgagctgacattgattccaggggacccaaaacatcattgtggtcccccagttaaagtaggagcttatggaggccaagtaattaatggagttttagctcaggtctgacttacagtgggttcagtgggtccctggactcatcctgtggtcatttcccyggtgccagaatgcataattg

SEQ ID NO: 956372 - DNA, 591 bp, Homo sapiens
ctgttctatgtttttcttttcctgttaagctgtctgttgtcagctcatttctgcagtgaatcttcagagaggagattggaagctttccttccacccatacgatagaactataaagcagaagagtttagaaagamtttcctttttaagtgacgaaacctcatactccatttgtaataaatagcacaaaggttaaaaaagcttatttttcaccaaaagctctgttgacattctattaaacaaacaccgacctatttaatttttgtaatgcaaatggcagatattttcataattcttatgctaataaatcatttccctgattttttgggtaaaaccacatattcataatgaagtccagaaacgtgaattgttttatataatttattcttatttgtgattacaagtatacctctacagaaagttagtatactcacccaaaggtaaactgtccagaggataatgaaaactttataacttctcggaaacgcaataatgaaatgtaaccaaggacttccacgaaagccagtcccacaatgatgatggtcagccagagtattgataacctggaataataatagttgaaataatgaaaag

SEQ ID NO: 956373 - DNA, 605 bp, Homo sapiens
tttcttttcctgttaagctgtctgttgtcagctcatttctgcagtgaatcttcagagaggagattggaagctttccttccacccatacgatagaactataaagcagaagagtttagaaagaatttcctttttaagtgacgaaacctcatactccatttgtaataaatagcacaaaggttaaaaaagcttatttttcaccaaaagctctgttgacattctattaaacaaacaccgacctatttaatttttgtaatgcaaatggcagatattttcataattcttatgctaataaatcatttccctgattttttgggtaaaaccacatattcataatgaagtccagaaacgtgaattgttttatataatttattcttatttgtgattacaagtatacctctacagaaagttagtatactcacccaaaggtaaactgtccagaggataatgaaaactttataacttctcggaaacgcartaatgaaatgtaaccaaggacttccacgaaagccagtcccacaatgatgatggtcagccagagtattgataacctggaataataatagttgaaataatgaaaaggtcaatgacactgacaatatttcact

SEQ ID NO: 956374 - DNA, 753 bp, Homo sapiens
ttgggatgatcttcttgtgaagtatctcactggggttctctacatttcctgaatttgcatgttggcctttctagctaggttggggaagttctcctggatgatatcctgaaatacgttttccacttggttccattcttcccatctctttcagggaaatgaactagttgtagatttggtctctttatataatcccatgtttctcggaggtttgttgattccttttcattcttttctctctatttttgcctgcctgcctgtcttatctcaggaagatggtctttaagctctgagattctttccccaatttggtctattctgttattaatacttgtgcttgcattataaaattcttgtagtgtgttttcttaggtctatcaggtcagttacattattttctatactggctattttgtctgtcagctcctgcattgttttatcctaattgttagcttccttgtactgggtttcaatgtactcctgtagctcaatgatgttcattcccatccatattctgcattctatttctgtcattttggccatctcagcctagttccgaactcttgctgaagaggtgatatggtcatttggagaaaagaaggcactgtggctttttgagttttcagtattcttstgccaattctttctcatcttgcgggcttatctaccttcaaactttgaggttgctgacctttggatttctttttctcttttaccctctttgatgaccttgaaggtttgattgtggtataaagt

SEQ ID NO: 956375 - DNA, 477 bp, Homo sapiens
ctcagggtgctgggatcacaggcatgagccactgcacccggtcttgatttcttatttttacaaagagactaaagatacttggatctgtaaataaacattttttttatcacactgaaaaattgtattatgaagaggcatatacgaattatgaaatgatgtattcataaactgctagcctgctacggaatgttggaatatgacagacaattcacaattgtctacttttcactactgtctagttttctctataaaaggaaggttactaatgataaaaattaattataactaatataagtaaattaaactactaaaaataataacagtgaagggaaacaaacacaaggaaggggctgggcatagtggytcatgcctgtaatcctagcactttgggaggctgaggccagagactcacttgagtccaggagttcaagaccagcctgggcaacacagcaagaccctacctcttaaaaaagaaaa

SEQ ID NO: 956376 - DNA, 632 bp, Homo sapiens
tcacagctgcaagctatgttgttacttagttgttcctcatgggacagtcagtctctagcacagtttctgaatgtctgaaggaagtcaacgggaagcaycgggtcaatttcctgcctcagactgcaaaacggatctggacacatctcccatcactttgtgatacccatttgctttttcttcttgaaattgtactgtatggaaggtatttctctgtcaggttcatatttcacatagttttcaaaatttcagaagtatcacatacatcccaagtgctcatggctcccgtttgtatttagtggtgtgcaggcaacatcttcgccttctggtgcccttggtaagtcttcctggtcagccccctgcagtgctgactgccctggaactgttctgtttctcttttttaaattaattaattaatttatttatttatttatttatttatttattttgagacggagtctcgctctgtcacccaggctggagtgcagtggcgcgatctcggctcactgcaagctccgcctcccgggttcacgccattctcctgcctcagcctccggagtagctgggactacaggcgccttttttatttatttatttatttttagtagagacagggtttcaccatgttagccagg

SEQ ID NO: 956377 - DNA, 836 bp, Homo sapiens
ggcctcagacagaggaattggcaagtgccggagacacacactggattaccctccctttccmaaaataaattaaatgctgaccagcatttctcgggataatcaggaaattggacccatgatcatgtcatcaaatatccttctcaagggaatccaaattatgtaactggctccactctggaaggctcagtcacgtactcatcatggcatactttttggataaactttgtttgaaagagctgaacacaaaaatatataggcagccgtttgtgtccactctttccaaggtcacaccagagtttgtgttatcctatgaagaattttatgtcactttgcagggacagtgggtaaactgtcctctcaaattagattttacttccatttgcaggtactttttttagaatgaaagccttatttgacttaattgcaacaaaattaccaccaccaaacagtttacataactatgaagttaataaacgtggttcatatttttttttttgacggagtctcgctctgttgcccaggctagagtgcagtggcgcaatctctactcactgcaagctctgcctcccgggttcacgccattctcctgcctcagcctcccgagtagctgggactacaggcacctgccaccatgcccagctaatttttttgtattttttttagtaaagacggggtttcaccatgttagccagaatggtctcgatctcctgacctgctgatccgcctgccctggcctcccaagtggttcatatttcttaaccctttaagaaggggtagcacattaagtactttctataggaatatttctaataagtgatgaatacactaatttttct

SEQ ID NO: 956378 - DNA, 462 bp, Homo sapiens
ccagctgggccataagagcaaaacgccgtctcaaaaaaaaaaggccaggcacggtggcttatgcctgtaattccagcactttgggaggccaaggcgggcagatcacaagtcaggagattgagaccatmctgaccaacatggtgaaccccatctctactaaaaatacaaaaattagctgggtgtggtggcgtgcacttgtaatcccagctactctggaggctgaggcaggagaatggcttgaacctgggaggcggagattgcagtgagctgagatcacaccaccgcactccagcctggtgacagagtgagactccgtctcaaacaaaaacaaaaacaaacaaaacaagaacatttacaatctattctctctaaagcctactaccagaggcttcctctacatcatgggaagttggtttccacaaccccttaacttaacccagacattcccatctattggttcta

SEQ ID NO: 956379 - DNA, 760 bp, Homo sapiens
tgtcagactggatttggagaatcaatatctctgcttcctcatcccttgggtgggaaaatactgagagcttatttgacacactgkcctgggtcctcagcaggactgagccacttgtgcccgtggtgacagcttgctcattaatgcacctagtattttcttctccccttccctgtctcactttccttctctaccaggctttctgggatcacctcccaagtattctacttatactcaaatccttgtctcagagtctgctttgagaaaaacccaatccaatatagctttcttgctgtttcctaaacatgccaagtatactgcagggcctatgcactgacttttaactctacccctaatgcttttcttccatatagctgaatggctcactcccatgctcactcaggtctccactcaaatgttactttatccaaggccttccccagcaagcacactttccctcattcttattctcattcttttgttttgttttgttttgttttttgtgagacacagtttcgcttttgttgcccaggctggagtgcaatggtgcgatcaccactcaccaccacctctgcctcacaggttcaagcaattctcctgcctcagcctcccgagtagctgggattacaggcacgtgccaccaccctcgactaattttgtatttttagtagagacagggtttcagcatgttggccaggatggtctcaatatcttgacctcgtgattcgcccacctctgctggattacaggcatgagccaccgc

SEQ ID NO: 956380 - DNA, 774 bp, Homo sapiens
cactacactcaatactacatgggcttcagcaacctacgtgtggataaagaaactgtggtgtgtgtatatatatatatatatatatatatatgatggaatactactcagacataagaagtaatgaagtaatggcatttgcagcaacttggatgagatcggaggctattattctaagtgaagtaactcaggaatggaaaaccaaacatcgtatgttctcacttataagtgggagctaagctatgaggatgcaaaggcataagaatgacacaatggactttggggactcagggggaaagggcgggaagggggtgatggataaaaaactacaaatcgggtgcagtgtgcactgcttgggtgatggctgcaccaaaatctcacaaatcaccactaaagaacttcctcacgtaaccaaataccacctgttcccccacaacctatggaaataaaaacgtttaaaaaaaggctgttaaatgggctaaactcaccaatgaaaagcagagatggttggactggctaaaaatcaaagacttaaagtatgctgtctgcaagaatcacacctgaaagacaaagacagactgcaaatatagaaatggtcaaagatacagcattcaaaccctgaccccggggcggctggcacggccacgaacatcgcaggcamcatagactccagggcaaggaagatggacgaagacacgtggagacagttcatcagtgaagaaagggtcagcctgttaaggagacccacagtcctaaatatgcacgcacgtgatggaa

SEQ ID NO: 956381 - DNA, 596 bp, Homo sapiens
cgtcgcagtgcaggctctcccgagggccaggacgccctgtctgagcagggctccaggaacaatgaggctggccccggccacacttatgcccagccaacctcagcacygacagtggcctgccctgtgcctgcccctgcccatggctcctgcctgctctcctcatgggaactgctgcgcactcactgagcatctgcctccttgagaaaaaactttgttttcttcttaaaaacattgtggtcccggcgcagtggctcacgcttgtaatctccacactttggggggctgaggtgggcggacctcaagtgtgaggtcagaagttcgagaccagtttggccaacatggtgaaaccccatctctactaaaaatacagaaattagcccggcatggtggtgggggcctctaatcccagctactcaggaggctgaggcaggagaatcgcttgaacccaggagaaggaggttgccgtgagccaagatcacgccactgcactccagcctgggtgacaaagcaaggctcgaaaaaaaaaaaaaaagtagtaaaataaacgtaacatacaatgtatcgttttaaccatttttcggtacacagttgagtgc

SEQ ID NO: 956382 - DNA, 555 bp, Homo sapiens
tccccgctcatggaggcacagggacagccatgtgtgcccgcaggacgcctggctctgcccactcgcccccacagcatgctgaggagctcgggctttgctttctagggtacagtgagaacacgggagaggactgagagaccgctggctgccgagggaggaagagcaggattcgcacccccgtcatcgctgggcccacacgccgccgacagcttccgcgtgtggccatctgtctttcagaaaccctctggcagagggacccagcagatgacacgggggccgttcacactctgaaacctgcctggagtcaaaacactgctggcgagcctccaccgcaaacccaatccagatggtcttccctggtggccctcggggtggcgggcaccctgcccactccctgccagcccctgcccgctggactccaggcccggccgagcccccgaccggtctcctgacccagcatgctgctctcccctgggcccggcttyctcgcccgctgggactcccaggcccctccagcccagccccgagagcaggagccccaagggaggcttggcg

SEQ ID NO: 956383 - DNA, 574 bp, Homo sapiens
attgtccttcctgtgtcagtagtaagctttttgtctggctgcttttatagtctctttatttctggtgtttttcaacttgaytgtggtctttctagcatggatttctttttgtttatcctgttttggattcattgtactttctgaagataaagtatcatgtctttcagcaattctggaaaattttcagccattattttgttcaatacagtcattctgcggtatccactagggattggttccagaacccaccatggataccaaaattagtggatgcttaagttcctgatataaaatggtgtcgtatttgtatataacctgtgcacattctcccatatatgtatttttttctttgtttttgagatggagtctcactcagtcgcccaagctggagtgcagtggcacgatcttggctcactgtaacctccgcctcccaggttcaagcaattctccagcctcagcctcctgagtaactggaattacaggcgcccaccaccacgcctggggtaatttttgtatttttagtagagaaggggtttcaccatattggccaggctggttttgaactctgacctca

SEQ ID NO: 956384 - DNA, 379 bp, Homo sapiens
ctttcttctgcagacagtgccatcaaagccccaaatgcccagcctagctcgagcacccagccgaaacatcagctcccacagcttctggaccaggccaccctgaggctcctcacttccagaacttttgacatggcctttgttgcccaagatgccagcttgtagtcagccactcagggctgtgtaggcacctgtgccctgggacatctttttttcctttgcaggcctgaggtggcacctctcatcctgtccatacgagattagaggtcacatggcacctagtatctgccttgagctgtgggctttcccgcctgtgcccatgttctgaccagggtgcagggtgggctstccgttcccgggtgtttcccgcctgtgcccgtgc

SEQ ID NO: 956385 - DNA, 561 bp, Homo sapiens
ttccatcatatggctataccacattctatgtatccattcttctgttgatggacttttgggttgtttctaccctttggctgttgtaartggtgctgctatgaacattggtgtacaagctttggcttgaatacctgctttcatttctttttggtgtatccccagaagtgaaattgctagatcatatagtaattctatatttaattttttgagggactgccaaactgttttctacagtggctgtaccactttctgtttccatcagcaacttgtggggattccaatttttcttttcttttcttttctttcttttttttaagatggagtctcgctctgttgcccaggctggagtgcagtggcgcgatcttggctcactgcaagctccgcctcccgggttcacgccattctcctgcctcagcctcccgagtagctgggactacaggcacctgccacgacgcccagctaattttttgtatttttagtagagacagggtttcaccgtgttaggatggtctagatctcctgaccttgtgatctgcccgcctcggcctcccaaagtgccgg

SEQ ID NO: 956386 - DNA, 584 bp, Homo sapiens
tgacctcataccctacaaccacggcttacctatccactacctccaagccaggcccaggaaaccatgagacagccctctcctattattgaagggccccgggtgttccctggtggaatattcccccatagccacaggaggtccctggccccccctgcccttctcctccaagccattggccgcccttgcccaccacgtgccttgcacaatgaataaactggccttccctgcctctgcgtgctcctctcccagcctagtgtttatttcattctttctcgggccctctatgcaaacacacccctggcttcggcaaccctagagacgagccacgtcatgggagcatttccagtggcgctgagttcccggctcccatccccacagcccaggcctcctggatctgcacctccaggcagctctcagggtgaccctgctgcaaatccaggattcaggtggtgatgtctctgatggcacatctggccagagggctccttggcaggaggggcctggtgcccccatscctccctgtccctggtgagtttgaggaaccccggggacagggcccaggttggcttctgtgcagggccctc

SEQ ID NO: 956387 - DNA, 697 bp, Homo sapiens
gtttaactacaaaggagccctggctgcccgccccgcccagacgcactgacctgttgttctctgtggctgctgatggcccrtccccaaccactggtgactcttccctggggccccaagctcagcccctaaccccctgttgctggaagtcagggaccccaaacagagagaccggctgaaaccatggcagaagaacgtggattgtgaagattttatggacatttattagttccccaaattaatacttttgtaatttcttatgcctgtctttactgcaatctctaaacataaattgtaaagatttcatagacacttatcacttccccagtcaatacccttgtgatttcctatgcctgtctttactttaatctcttaatcctgtcagttgaggagggtgtatatcattccaggaccctgtaataattgtgttaactacaaaaattgtacagcatgtgtgtttgagcagtatgaaatgtgggcaccttgaaaaaagaacaggataacagcaattgttcagggaataagagagataaccttaaactctaaccgccggtgagccaggaagaacagagccatatttctcttctttcaaaagcaaatgggagaaatatcgctgaattctttttctcagcatgggatatccctgagaaagagaatgggcacctaggggtaggtctctgaactggcccccccggggcgt

SEQ ID NO: 956388 - DNA, 710 bp, Homo sapiens
atatcttaatgctccagcccaatcaaagctcaattaaatcgtaatctgtggcatcagcattttgaatacaggcatcagtattttaaaagctttcctggttactatrggaacaatgaaaacattttaatatttatttatttactttttaaacttttattttaggttcaggggtgcatgtgcaggtttcttacatgggtaaaatgtgtatcatggtggtttggtgtacaaattatttcatcactcaggtaataagcatagtacctgattggtagttttttgattgtcaccctcctctaaccctccacactgaagtaagccctagtgtctgttgtttccttctttgtgtccacatttactcaaagtttacctcccacttataagtgggaacatgatgtatttggttttctgttcctgtgttagttttcttaggataataacctgtatagccccatccacgttgctgcaaaggacacgatctcattcttttttatggctgcacagtattacattgtatatatgtactacattttaaaaatccagtatattgttgatgagcatttaggttgattccatgtatttgttattgtgaatagtatcatgatgaacatatgtgtgcatgtgtctttatggtacaacaatttgtatattttgggtatatacccaataatgggattgctgagtcaaatggtaattctgttttaagttcttcg

SEQ ID NO: 956389 - DNA, 556 bp, Homo sapiens
acagggcctcagataagtcccttcaagcctttagggtctctacttaccgaaaggacaggaaaggcttccctacatccctcaagggcagagagaactcgcattctctgataggacgagcaactcatcccagtacgatgggactcccagggtctccctctgtcaggagcaaaccaggatggctggtcactacatttactgggattttgtcaggcttttcctgtgcaacctatgtgcctcgtctcatctcacttaatctccaccacagtgctatgtgtgagacagataacatcaccctcctgtgacagatgtgaaatctgagttttgagaggctacgtgtggctggggttagttagaattggggctggactgctctcatctccaaagcctgtgctttcatctgcatcagtgatcctcaaatgttcacatcaaaaaaatggagtgatcctcaatttgttcacatcaaaattagtgggagaggttagaacycagaggttctgattcagcagtttggagaaggggcctgagaacgtgcatttctacagttcccaggtgatgc

SEQ ID NO: 956390 - DNA, 556 bp, Homo sapiens
acagggcctcagataagtcccttcaagcctttagggtctctacttaccgaaaggacaggaaaggcttccctacatccctcaagggcagagagaactcgcattctctgataggacgagcaactcatcccagtacgatgggactcccagggtctccctctgtcaggagcaaaccaggatggctggtcactacatttactgggattttgtcaggcttttcctgtgcaacctatgtgcctcgtctcatctcacttaatctccaccacagtgctatgtgtgagacagataacatcaccctcctgtgacagatgtgaaatctgagttttgagaggctacgtgtggctggggttagttagaattggggctggactgctctcatctccaaagcctgtgctttcatctgcatcagtgatcctcaaatgttcacatcaaaaaaatggagtgatcctcaatttgttcacatcaaaattagtgggagaggttagaacccagaggttctgattcagcagtttggrgaaggggcctgagaacgtgcatttctacagttcccaggtgatgc

SEQ ID NO: 956391 - DNA, 615 bp, Homo sapiens
aggattctttaatacacccccatgtatggcttcactgttgcaatttccttgaatcttggatgacctatgaaattgagcttaaaattatgagtgaaatttagcgtggcagaaraagttcggaacccagaatcactatgctggcaaaatatttttgctaggtagagtttttaattataaaagtgtaaaacgaaaataaatcttgggaccccaaagtcactaagccaaagggtaaagtcaagccaggaactgcttagggcaaacctatctcccattctattcctacaccaagatagctactaagataaaaaaagctgcatacctccctcacaaggaatttctttgtggacaaaggacagacagaactcgaagtcacccctctgctcactgagataaatgcatatctgattgtctcctttggaaagggctaatcagaaattcaaaataatgcaactgtttgtctcttatctacctggaagccccctcccagtttcgggttgtcccacctttctggaccaaaccaatgtactctgttgccaggctggagtgcagtggtgatttggctcactgtaagctccgcctcccgggttcacgccattctcctgcctcagcctgcca

SEQ ID NO: 956392 - DNA, 574 bp, Homo sapiens
ggaagtgtagagggggtgcagacctgttcacaccaccattcaggtgtccatcataaacatctgttttgtttgtagctcatcatttgcgtactaggggagggagtcaaaatttcattcagttccatccagtcaacttaggaaatgtttattcgttctctgtaacatattcagtctcagaggctctccccacacccaatttctcctcctgcgagagcatctgtgttagtggaggagctcaccgtggcttctttgcagagggataccttgggtctttgggggcctctggtgctgaaatccacggggaaagaatctggactattcttttggcctaagagatgcttccagaaagcgtcgaccatcacttcttgctggccggctcctaccttggctctcactggttaataaaatttaggtaaaggctgggtgcggtggctcatgactgtaatcccagcactttgggaggccgaggcrggtggattatttgaggccaggagttagagaccagcctggccaatttggtgaaaccccatctttaccaaaaatacaaaaattagctgggcatggtgacaggtgc

SEQ ID NO: 956393 - DNA, 642 bp, Homo sapiens
tcacatatgcgagcgtctgagctggccgtgagaagtccagaatggctctgatccactcccccttggtgaccgcttctgagtctttaaatgatgacaggatcagtgctctgtgctgagattgccagtcctgtcctgtggtttcaggctggtggattgcccgaggccactctctgagtcacgctgcagggctgagtgcttgttgcagcgaagacaccccctggcattcatcatctgctcccaggctcactgatctgcactgcctcttccttttgtcccatgaattagctgctaatgtgctgtctttccgcgtgggaggaagtggaggaagctgcctcggtggaaatgccccaggtgaaaactgccaaggccacactagtcacaagacagcagttcgttttcaataaggggagagaaggaaaggaaggaagaacccaggcatgttctcaaaatatgcagtatgcgaggaagaacttaattgagttgatcagatgcaggaattcagatacagagattagatacactgaccaagatcaaacagcccaagagccaggcgctkgctgctgggacccaggcagttggccccagatgcccaacaccccaggaggtgctgtggggctggcaggtggggtcagcctgagttca

SEQ ID NO: 956394 - DNA, 656 bp, Homo sapiens
ttttatgccggcaccatgctgttttaggtactatagctttgcagtatattttgaartcaggtagtatgatgcctccagctttgttctttttgctcaggattgctttggctattcgggatcttttgtgcttccataggaattttagaactttttctatctctgtgaagaatgtcattggtattttatagggattgcattgtatctgtagatcacttttggtaatatagtcattttcacaatattaattatttcaattcatgaatatgggatgtctttctatttttttgtgtcctcttcaatttcttttatcagtgttcatagctttccttatagaggtctttcacctccttagctaaacttattcctaagcattttatatatttttgaggtagctattgtaaatgggattgtttttcttgatttcttcttttcagctagtttgttgttgatgtatagaagttcctctgatttttgtatgttaatttcatactctgcaactttactgaatttgttgatcagttctaagagttttttggtggagtctttagtttttcctaaatataagatcatgtcatctgcaaacaactttccactttggatgttctttctttctttgcctagttgctctggctagggtctccagcactgtgtttaat

SEQ ID NO: 956395 - DNA, 656 bp, Homo sapiens
ttttatgccggcaccatgctgttttaggtactatagctttgcagtatattttgaaatcaggtagtatgatgcctccagctttgttctttttgctcaggattgctttggctattcgggatcttytgtgcttccataggaattttagaactttttctatctctgtgaagaatgtcattggtattttatagggattgcattgtatctgtagatcacttttggtaatatagtcattttcacaatattaattatttcaattcatgaatatgggatgtctttctatttttttgtgtcctcttcaatttcttttatcagtgttcatagctttccttatagaggtctttcacctccttagctaaacttattcctaagcattttatatatttttgaggtagctattgtaaatgggattgtttttcttgatttcttcttttcagctagtttgttgttgatgtatagaagttcctctgatttttgtatgttaatttcatactctgcaactttactgaatttgttgatcagttctaagagttttttggtggagtctttagtttttcctaaatataagatcatgtcatctgcaaacaactttccactttggatgttctttctttctttgcctagttgctctggctagggtctccagcactgtgtttaat

SEQ ID NO: 956396 - DNA, 699 bp, Homo sapiens
tggtgtgataatagcttactgtaacttcagactcctgggctcaagggatcctgctgcctcagcctttccagtagctaggactacaagcatgcaycatcacactaagctaagtttttaatttttttgtgaagacagggtcttgccatgttgcccaggcaggtctcaaactcctgacctcaagcaatcctccgaccttggcctcccaaagtgctaggattactggcgtgaaccactgcacctggccccgaacagatttttaagtgtacaacatagcattgcagaacttgttcatcttatgcattatttttatataagaagggtgtggtggtatggttgctagagaaaatgcaggatcccagttaaatttgaatttcagataaacaacactttttttttaagtataaatatgtcccaaatattgcactttcccattggcccagcttggctcatgtgaccatctctccactaatcatggaacctctgattggccagaccatggtcaggtgtcccacagtcagaactgtattattaatactacagatttatttaattttcaaatttaattgggtgtcttgcatttttattttgtacatttggtaaccctacgtggaagaaagtcagatgggtagggggtgggagaattcctgagtttggggaaggagagagattcaagtaggttcccaggaatgtgagactctt

SEQ ID NO: 956397 - DNA, 627 bp, Homo sapiens
cagacccttcaggaatgaaggtttgggtcacttcaccaggtaaaaaaccatgatctgccaaggtgcttgctgaaggcaaagggratacagaatgggtagtagaagaaggtggtcatcaataccagctatgaccatatgaccagttgcagaaacaaggactgtaattgtcatgactgtttcctccttattttaagaacatgtttgtgcatgtatacacttgtactaagaaaacatcttcattttatttcctttctttttcctttatcatgtgacgtagatatttattgacttcatatcagcatttaagtattgttaactttatgtaatagcatttgggttggggattggtgcatttccagttgtgcaaaggatagctgtattatgttaggcataattatgaccttattattgcctttatttgaagattatgtatgatttcagaaaatatgtatgggttcaagttgacaagggttggacttgtgatggttaatagtaagtgtcaacttgactggattgaagaatgcaaagtattgttcctgggtgtgtctgccaggctgttgccaaaggagattaacatttgagctagtggactaggaaaggcagatccacccataatctaggcgggca

SEQ ID NO: 956398 - DNA, 774 bp, Homo sapiens
tcttttccaagtcatcctcaccctggggctgaagaatcaactrcaagtttccatggcacaggatgtggtgaaacaagcacgagctttcctgcttctgctcagaagtgacatttaattggccaaagcaagtcatatggtcacgcctatgtccaaatgaacagggaactgctatctactctatgcgcaggaggagagtccgaatatttgtgaatattcatatatccagtgggtccccaacacctgctgcccacctgttcattggacaacacattcgggacgtctttactaaggtctgaaacagatgacgagagcgtgaagcagaagcttcaacagacaaactgtgactacttctcccctgtgtcttcaacaagtgatttcttaaagcttaaccattaaatagtacagaacttaaatggttatttaagaccctaaataatcatcaccatcctgtattttaaacacacacacattcacacacacacagcagcaactgccaaccatctgtactgaaaatattctttattttacaaataagacttttccgggactggagtccccagtgaaatgttgctttacaaagcccagtcaatcccaagtgaaagttctttctttcttagaaaatgtcatcatctgtaaatgttccctggtgccaagctcaaggaggggctccagagtttctcccagaactaaatcctctgtgaatcaagcttttagatactctcaacattcctggcatccagacattcatacaaccctgaattatttattcaccaa

SEQ ID NO: 956399 - DNA, 639 bp, Homo sapiens
acatatgcgagcgtctgagctggccgtgagaagtccagaatggctctgatccactcccccttgtgaccgcttctgagtctttaaatgatgacaggatcagtgctctgtgctgagattgccagtcctgtcctgtggtttcaggctggtggattgcccgaggccactctctgagtcacgctgcagggctgagtgcttgttgcagcgaagacaccccctggcattcatcatctgctcccaggctcactgatctgcactgcctcttccttttgtcccatgaattagctgctaatgtgctgtctttcgcgtgggaggaagtggaggaagctgcctcggtggaaatgccccaggtgaaaactgccaaggccacactagtcacaagacagcagttcgttttcaataaggggagagaaggaaaggaaggaagaacccaggcatgttctcaaaatatgcagtatgcgaggaagaacttaattgagttgatcagatgcaggaattaagatacagagattagatacactgaccaagatcaaacagcccaagagccaggcgctkgctgctgggacccaggcagttggccccagatgcccaacaccccaggaggtgctgtggggctggcaggtggggtcagcctgagttcaa

SEQ ID NO: 956400 - DNA, 757 bp, Homo sapiens
tctgtggccgctgtccttatccagccacctgcaagggaactgcagccatgtggaaatcacctatagctggagaggagcctgtccaaggggcttctgggataagcaacagcaggaagggagattagccatcaaaacagaactgtgtagctccaaatgagaacaaaaaacttaactttaaaaaaaagttacctaatagcagaataaagcgtgaagaagcctgtctgcaatgagtataggggggttagaagagcaaagtcatccagctttagtgcttggcaagctgtccattttccagcccccctgaatgacttgagcagctctgtgggccccacatgtgcagccagtaacaggatctcacccaccccaacccaagggtcctgagcgtctgtctgcaatccccacatccctgctatagaggggcagacagaacacatatgctgcccatttgtggaacctattgattcataagagggactagttctgaggcaggcactggctgtgctagaaattaattcactaatcaattactctcacatccccggtctgcgggatatttctgtgcgatggattcctcctgccccactgagctgcggctttggtttttataataagatggtggcggygggaggagccaagatggccgaataggaacagctcctgtctacagctcccagcgtgagcgacgcagaagacgggtgatttctgcatttccatctgaggtaccaggttcatctcactatggagtgccagacagtgg

SEQ ID NO: 956401 - DNA, 565 bp, Homo sapiens
ctcttcactgacaatatgattttatacctagataaccccaaagactccaccaaaatgctcctggaactgacaaataactttagtaaagtttcaggatacaaaatcaatgtacaaaaatcaatagcakttttatacattaataatattcaagctaagagccaaatcaagaatgcaatcctatttacacttgccacagaaaaactaggaatacttctaaccaagatggtaaaagatctctccaaggagaactacaaaatattgctgaaataaaccttagataacacaaaaagaattccatctcatggattggaagaatcaatatcattaaagtaaccatactgcctatggcaatctatagatccaatgctattcctatcaagctatcaacataattttagaaaaaattattctctaattcatgtggaaccaaaatgagcctgagtagccaaagcaatcttaagcaaaaagggcaaagctggaggcatcatattaccagactttaaactgtgctgtaaggctacagtaaccaaaatagcatggtactggtacaaaaacaggtacatag

SEQ ID NO: 956402 - DNA, 563 bp, Homo sapiens
aggccctctcctcaagtactcagctctcagcagagagaaagccctggaaagcgtggctcatctctgcaggcagatcatttggaagtctctgcaggtctctgaagctctcagcaggagggtagctcctctctgcagcgggtcatcccatcatctctctgtcctctgccctctgccctgctctggctgagctgccggcttttatggatctcagaggggaggaaacgctagccgattgttccatgagcagccatgggcaggcctggaagaggcaccacaggtccccactctgatctgtggaactggacgccctacccccagccttcaggccctccctggcctgaaggtggggccttacgggggacccaaccccttccgcccaggaatctgtctgcctcccactgccattcatggtcccaggacttggccccaaccttgctcagagactggagcaggcccagagctgagagaggccaggcagcaggagcagacaccccggagcctgggggacaggkgtcttcccagccccctgaggctgcaggctgcagagatgcccgagtcctgca

SEQ ID NO: 956403 - DNA, 606 bp, Homo sapiens
atagattcaatgctatccacatcaagctaccactgactttcttcacagaattggaagaaactactttaaacttcatatggaaccaaaaaagagcccacatagccaagacaatatactaagcaaaaagaacaaagctggaggcatcatgctacctgactttaaactatactacaaggctacagtaaccaaaacattatgttactggtaccaaaacagatatatagaccaatggaacacaacagaggcctcagaaataacaccacacatctacaaccatctgatctttgacaaacctgacaaaagcaagcaatggggaaaagattccttatttaataaatggtgttgggaaaactggctagccatatgcagaaaactgaaactggacccctttcttataccttatacaaaaatcaactcaagatggattaaagacttaaatgtaagacctaaaaccataaaaatcctagaagaaaacctgggcaataccattcaggacataggcatgggcaaaggcttcawgtctaaaaaccaaaaccaatggcaacaaaagccaggattgacaactggtatcaaattaaactcaagagcttctgcacagcaagagaa

SEQ ID NO: 956404 - DNA, 594 bp, Homo sapiens
atgggcttccctttgtgggtaacccaacctttctctctggctgcccttaacatttttttcttcatttcaattttggtgaatctgacaattatgtgtcttggagttgctcttctcaaggggtatctttgtggtgttctctgtatttcctgaatttgaatgttggcctgccttgctagattggggaagttctcctggataatatcctgcagagtgttttccaacttggttccattctccccgtcactttcaggtacaccaattagacgtagattttgtcttttcacatagtcccatatttcttggaggctttgttcatttctttttattcttttttctctaaacttctcttcatgcttcatttcattcatttcatcttccatcgctgataccctttcttccagctgatcgcatcagttactgaggcttgtgcattcgtcacgtagttctcatgctgtggttttcagctccaacaggtcctttaaggacttctctgcattgsttattctagttatccattcgcctaattttttttcaaagtttttaacttctttgccattggttcaaacttcctcctttagctcggagtagtttgat

SEQ ID NO: 956405 - DNA, 655 bp, Homo sapiens
cagcctcccaaagtgctgggattacaggcatgagccactgcacccagccaactcatacttctttaatatgtttttrcattctgaatactctaaatcaacttttagtggggatcagcataaacttagagctcactcagctctaccttcagagttacagtctgtcagttcacaacacttgtgatttgtgtgacaacttttcactgaggcacaggggaacatgaatgaactttaggtcagacagaccctagttcaaatttttaggtcaccactttctagttcgtgtaacctcagagttaccaatgttggggaatctgttttctttatccatacaatgaagatcataattctcagcttgccacattgttgggaatgtacacaatactgtgtttgaacatgacaggtgctctgtagatggtttctacattaataactattatcataattattgttgaaactgcttgcctaagacactcaagcctctgattaatatattagtggtatttaaacactaactcttaacagttacctgatattcttttgtactcttaaataaaactgaatgactcatagaagttgagggaatttccctgaccttctacaatgcctgtctcatttttgtttttttcctaaggagctcaaggttacccttgaatta

SEQ ID NO: 956406 - DNA, 791 bp, Homo sapiens
gtggttgctgaaggctggggtggctgtggcrgtttctgaaaagaagactacagtgaagtttgcctcataggttgactctttctttcatgaaagtattttctggagtgtgcgatattgctttttgatagcattttacctataagaaaacatcttttaaaattgtagtcaattccctcaaacactgcttctgccttatcacgtaagtatatggaatattccaaatcctttgttgtcatttcaacagtattcacaaggaatagattctatctcaagaaactagtttctttgctcatccgtaagaagcaactcctcatcctttaagtttgacatgagattgcagcaattcagtcttgtcttcaggctccacttctaattctagctctcttcctgtttccaccacatttgcaggaagttcctccactgacgtcttcaaaccccaccaagtaatccataaggcttagaatcagcttcttccatgaatcataaacgttgtcaatggcttctagaatgttgaatcctttccagaaggttttcaatttaccttgcctagatctatcagagaaatcactgtctatgacaatgatagccttattgtattagtctattctcccactgctatgagtaactacctgagactgggtaatttatgaagaaaagaggtttaattgactcacagccatgtacaggaaacatggttgtggaggcctcaggaaacttacaatcatgggggaaggggaagctatcaccttcttcacattgcagagcaggaggaagagagagaacaaaagggg

SEQ ID NO: 956407 - DNA, 579 bp, Homo sapiens
ttatatatatatatgtatatgctgccatatagagattaaaggtgtgcatttttatataaaatgcatctttatataaaatgcacatttttaatttataagactgagtaaattcaaggcaaaattgagttgttgtcaactctggatgcaaaaacaccatgggaaacactcatgaaagatggcagatggtccaaaggggagaaaggggttatcctactgaggaggttttgacaccttcagcccctgcctcctccaacacttaagtttcccaaatagccgtgtacacaggcatcttgaatggtggagaatatttatgatggcagtaaatgaaaatggtctctggtttttgggactcttcagtaagcacacagactccatttctccatagagcaccaagaaaaatccacactgaacttggcatctctctcatgagtgccaaggggaaaaggaatgatgggmtgggccccctaaaccacagacaccttgtaatcattggtctaggacatgcagatcaattttctgccaatggcttactgtgaatgttgtcaacattcttatgtaagattctttatttaaaacagt

SEQ ID NO: 956408 - DNA, 569 bp, Homo sapiens
atacttatcatgcatttaattaggtaattacaaataatccaatattrccagcaactcactagagacgtttaaagttgagtattctaaatttttaagctaataaatgtgaagaaagtataaatcaggtaggagatttgaacccaaaacttttcagctcccagacatcatttatgaaagatagaggtgcaaaaaagaacatcagtattccacacaaatcatgtttcttttcttcttaccatcgcttattggaacacactatatacataagaattaattaatttagtaatgagggataggtgttaataaatgtttaacaactggctgtcttgggagaaaagcctgatttgcagtatttgtggtttctgtggtacaaatatcaccaaaatgggcagtttcaaaacacaaactcaacatcacagaatgtggaagctggaaagagacgcaggaaaagggctctctggagtgagtcttagcacactactgggtgaaagggctgcaagaatattttcagttttagggacactattctattccacaagttattttgaaaattttatttactttaaaag

SEQ ID NO: 956409 - DNA, 625 bp, Homo sapiens
gagcagacaccgagctagctgcaggaagtttttttttttttgtaccccaaaaatgactggaaccccagcaagatagaaacgttaatycccctggacagggggctgaagcaagggagccaagtggtctcgctcagtggggtcccaatcccacagagccctgcaagctaagaaccactggcttgaaattctaactgccagcacggcagtctgaagtcgacctggtatgatcaagcttggtgggctgggggcggggggtgggcgcatccgccattactgaggcttgagtagaccgttttcccctaacagtgctaacgaagcctggaagttgagactgggtgaaactcaacacagtgcgacaaagtggctgtggccagactgcctctctagattcctcttcactaggcagggcaaatctgaaagaaaggcagcagtcccagtcaggggcttatagataaaactcccatcttcctgtgacagagcacctggggaaagggatggctgtgggcacagtttcagcagacttaaacgttcctgcctgccggctctgaagagagcagtagatcttgacaaggagggttcttccagcacagcactcgagctctgctaagggacacattgcctcctc

SEQ ID NO: 956410 - DNA, 625 bp, Homo sapiens
gagcagacaccgagctagctgcaggaagtttttttttttttgtaccccaaaaatgactggaaccccagcaagatagaaacgttaatccccctggacagggggctgaagcaagggagccaagtgktctcgctcagtggggtcccaatcccacagagccctgcaagctaagaaccactggcttgaaattctaactgccagcacggcagtctgaagtcgacctggtatgatcaagcttggtgggctgggggcggggggtgggcgcatccgccattactgaggcttgagtagaccgttttcccctaacagtgctaacgaagcctggaagttgagactgggtgaaactcaacacagtgcgacaaagtggctgtggccagactgcctctctagattcctcttcactaggcagggcaaatctgaaagaaaggcagcagtcccagtcaggggcttatagataaaactcccatcttcctgtgacagagcacctggggaaagggatggctgtgggcacagtttcagcagacttaaacgttcctgcctgccggctctgaagagagcagtagatcttgacaaggagggttcttccagcacagcactcgagctctgctaagggacacattgcctcctc

SEQ ID NO: 956411 - DNA, 819 bp, Homo sapiens
gctgatgactaatttgaagccaatgcttatttaccattttgaaagtctaatgcccttaagaattatgctaaatctcctctgcctgtgcatgtaagcrgaccaacaaagcctggatgacagcacatagctttataacatgatgtactgaatattttaagcctacagttgagacctactacgcaagaaaaaagattctttcaaatattactgattattaattgacagtgaatcttgtcacccaagagctctgatgcagatgtacaagaagataaatgttgttttcatgcctgctaaaacaacatccattctacagttcatggatcaagcagtaatctcaactttcaagtcttattattaaagcaatacatttcataaggctgtagcttttatagatagtgattcctctgatggatctgggcaaagtaaattgaaaactttctggaaaggatttaccactctacatgccattaagaatgtttgtaatgcatgggaagaagtcaaaatgtcgttagtaacaggagttaggaataagttgattccacccttcatggaggacttgagaggttccaaattatcagtcagaatgtaacttcaaatgtggtggaaataaaaagagaactatagtaaaagtggagcatgacgatgtgacataagacttgctgcaatcttatgacaaaactttaacaaacaaggatttccttcctatggatgagcaaaggaagtggtttctagatggagtctacacctggtgaagatgctatgaacattgttgaaatgtggcaaaggattcagaatattactaaaacttagttgataaag

SEQ ID NO: 956412 - DNA, 458 bp, Homo sapiens
tctatttcagcaaaggacaagggaagtagaaatgaaaataatgccagcattggcccaaaggcatgggatgaacttgatctgcttccttaggagaaggcacactcgagtgtccggtgaaggctatgatgcaaaaggctgaggccactgactaattgaacaaagagctcagcccagcagacctgggcacagtttggcacgtggcacagttagagaggggacagaagcaggccttgcctgcgaggtcccttactgctccatttccatacgcaggctttgggctgctatggaggaagaaacaccttaagatgaggttgtttaataattctatgatagtcctccccaacaggagccccacgattccgtgtgaatgacatgcacagagtcacgtcattmatttattttcatttattcatatatccattttcatatgtgtcatatattcattgaactaaattgtt

SEQ ID NO: 956413 - DNA, 593 bp, Homo sapiens
catctggtcctggactttttttatgttggcagyttttttattaccatttcagtctcgctacttgttattggtctgttcatagtttctatttcttcctggtttaatctaggagggttgtatatttccaggaatttatccatcttctctaggttttctagtttgtgtgcataaaggtgttcatagttgccttgaatgatcttttgtatttctgtggtttcaattgtaatattgcccatttcatttctaattgatcttatttgaatcttctctcttcttttcttggttaatcacactaatgatctattggttttgtttattttttcaaagaaccagctttttgttctatttatcttttgtgttgttttttgtttgtttcaatttcatttagtgttactctgatctttgttatttctttttttttctgtttggtttgggtttgattttttctttattctctagttttttgaggtgtgaccttagattatttatttgtgctctttcagactttttgatgtaggcatttactgctatgaactttccttttagcagtacttttgctgtatcccacaggttgtgattggttgtgtcactgt

SEQ ID NO: 956414 - DNA, 586 bp, Homo sapiens
tttttttttttttttttagcttgcttggagaatacttctgagactttccaaggtgaagtttataaatctatccatagtttaaatmttgaggcatggatatagttcctatctgttagaagtgtatcttgaccttgtaaatccatggagtaaaccctatactgtggccacatgatgaagagaaataagatgagaagccatatctatctcacactcaaaagaccaggcttttttctctataccatgctgccttaaattattaatacacaaggtagcaaaattccagccattcttcccatcccttatggaatcccatgtccactctcctggttattgtcattgtcatcttcctcttcatcctctttatgaactgtctaaagattgatgcttcctagctgggaatagttcatagagagtatattacattactgttctactcagcaattttacaatctgaaacagacaatagtgaagtggacctaaataagaagaatgtatagagaatagtggccgggcgcagttgctcacgattgtaatcccagccctatgggaggcggagggaggcagatcacaaggtcatgagatcgag

SEQ ID NO: 956415 - DNA, 690 bp, Homo sapiens
gtgaaattaacctaagcacagagaacctctccttgctcaggtggtaagggytcagctcgcgccgccttctcctccagcgttctctcctttgctcaggtgttaagggctcagctcacacccaccttctccttcactcaggtggtaagggctcagctcgcgccgccttctcctccagcgttctctcacacttgtacagtaggacgtgttggattttaattgtttgctaatctagccccttgttaccacacaggtgtggaaagggaagggaccatatttcatccccgtgtgcgcccagccctggcccagaagtctctcaatcgctactgagtgaatgcacgaagccgctccattagcccagttctcagtgagctcttcaccatacagttgatagtttgcttctataccctagaatgctgttctccaattgcttctgctcatcaaatctcctctcccgacacttcagaaattccctgaggatccagattacatttccaacactttcattcacataacactgtctgggacccagcaaactctcaaatgtccgctctacttactcccagtgaaatacatttcgttttcccgccgctgaagatgtcactcagggtctgccaacacgatgccacaagtacccaagaggagcagctcaaaagcatgatcaggattcaaagcatcagtttaatcttaggc

SEQ ID NO: 956416 - DNA, 807 bp, Homo sapiens
aaatgcaaaataactgaaatcctgaaatcataacagtctcttagactacactgtaatcaaattacaactcaggattaagaaactcactcaaaaccacacaattaaatggaaattgaacaacctgctcctgaatgactcctgggtaaataatgaaattaaggcacaaatcaaaaagttctttgaaaccaatgagaacaaagagacaatgtatcagaatctctggggcacagctaaagtagtgttaagagagaaatttataacaccaaatgcccacatcagaaagctagaaagatctcaaatcgacaccctaacatcacaattaagagctagagaggcaagagcaaactaatccaaaaactagcagaaggtaagaaataactaatatcagagcagaattgaaagtgatacggacatgaaaaaccctttaaaattcaaagaatccaggagctggttttttgaaaagattaacaaaatagatagaccactagctagacccataggttttagtatgttgtgtttcaatttctatcctcattgagaactttaaaaaaaacttttttttattttcttcattaatctattggtcattcaggagaatgttttttaatatctatttgtagagtttccaaagttcctcttggaactttctatagaactttcttggaacgtttctctcttgtttctatgctagttttattccattgcagtctgagaagacacttaatakaacttcaattttttaaaaaaatgttgaaacttgtttcatcatctaccgtatggtctatcctggagaatgtttggtgggct

SEQ ID NO: 956417 - DNA, 569 bp, Homo sapiens
ctggtccagggcttttgtttgtttgtttgcttatttgtttgttttggtaggtttcttattatagattcgattttgcaactcaatattgstctgttcagggtttcaatttcttcctgatttcattttgagagattatgagtttccaggaatttattcattttctatagattttctagtttgtgtgcacaaaagtgttcataatagtctctgaggattatttgcacttttgtggggttggttgtaatgtcatctttgtcatttctgattgtgcttatttagatctcatctctttttttcctgttaatctagctggtggtctactgaccttgttttatcctttcaagaaaccaacttttggttttgctgagtatttgtataaattttggggtctcaatttcattcagttctgctctgatttagttatttactttcttctgcttgttttggggttagtttggtcttatttttctagttcctctaggtatcaagttagatttctaatttgagatctttctaactatttgaggtaggcatttattgctataaactttccttttaagactgttttt

SEQ ID NO: 956418 - DNA, 604 bp, Homo sapiens
ggttgtttctactttttggttatcataaataatgctgctacaaatatttgggttcatgtgtttgtgtggacatgttttcatttctattggatatatctaggagtggaattgctaggccatgtgataactctatgtttaacattttgagaaactgctaacctgttttccaaagcagcagaaccatctttcaatcccaacagcagcgtataagggttttgatttttctacatcctcatcaacatgttgtctttttgatgaccgctatcctaatgtgtatgaagtggtatctcataatagctttaatttgcatctttttaatgattaattacgttgagcaaccttttatgtacttgttgggtatttgtatatcctcttagataaatgtctatttagatcttctacccattttttcaatcggattttttaaattgttgaatggtaagttttctattatatattctaggaacaagtccatcaccaacatcaaatgtattacttgcaaatattttctcccattctgtgggtgatatgtgacttccttgatggtgtmttttcaagtacgaatgtttttaactttgacaaagttgaacttatgtatttggtt

SEQ ID NO: 956419 - DNA, 661 bp, Homo sapiens
tctgcacaggaatcgaggacagcctaaacttctgatccaggaaagtaggtactctaagtgcttgaaaatctgctgtgcatggagtggagagggcttcctcccccagccccacaccgggatctctgcaaataaaacgtggcctgctcaggctgctgttttaggtgaccagtgctccaaatgcctggagatctgcctgggcatggagtggaaagggctcccctgttccaagatctctgcacagtatgggtggggtgactttggctgctgaaccaggcaagcaggtgttctgaatgcctggggctctccctgggtataaagcagagagggtcctcttgtaccaggatctctgcaaaggaagggtggggcagtttaggctactgatccaggtgagtgggtgctccaaatgtctagaatctgcctcagcatgaagtggagacagcctcactgtaccatgatctatgcacaggaagagtgaggaagctcatgctgctgatccaggtcagggggtgacccggatacctggagatatgcctaggtgtgaagcagagaggaccccactgtgccacaatcttagggtagcaggctggggcmcccagcaatggcacacacagaccagttccatgatgccaagctgatcctggctgcaagtcccatcatccag

SEQ ID NO: 956420 - DNA, 634 bp, Homo sapiens
gagagtatctgcacttgcagagtacaccaactgggggacattacattgaactcattgctcccctgtcatagtggcragcaaagccaggctgggctcacccagcacccacacacacaggagcatttggaccagccctagccagagaatcacccatctcagtggtcagaactcgagtttgttggcaagcttcgtcacccgcggccaaagtcctctggggggtcctaggtaaatttgaaaggtggtctaggacacacggactgcaattcctaggcaacttctaatgctgggctgggctgacagccagaggactaggtggcacctgacctaggaagtcactggccaaggtggctaaaggagtgattgcaccatccctcccccaaccccaggcagcacagcagacagcaatgaaagtgtctctttccttctgcttaaggagaagagggcgaagagtagagaggactttgtcatgcatctaggataccagttcagccagccatagcaagataggatgctgggcagaattgtggggcccccattccaggccttagctcccagaaggcgtttgtgtgtttttgtttgtttgtttgtttgtttgtttgtttgttttttttgacatggagtctcactccgtcgc

SEQ ID NO: 956421 - DNA, 634 bp, Homo sapiens
gagagtatctgcacttgcagagtacaccaactgggggacattacattgaactcattgctcccctgtcatagtggcgagcaaagccaggctgggctcacccagcacccacacacacaggagcatttggaccagccctagccagagaatcacccatctcagtggtcagaactcgagtttgttggcaagcttcgtcacccgcggccaaagtcctctggggggtcctaggtaaatttgaaaggtggtctaggacacacggactgcaattcctaggcaacttctaatgctgggctgggctgacagccagaggactaggtggcacctgacctaggaagtcactggccaaggtggctaaaggagtgattgcaccatccctcccccaaccccaggcagcacagcagacagcaatgaaagtgtctctttccttctgcttaaggagaagagggcgaagagtagagaggactttgtcatgcatctaggataccagttcagccagccatagcaagataggaygctgggcagaattgtggggcccccattccaggccttagctcccagaaggcgtttgtgtgtttttgtttgtttgtttgtttgtttgtttgtttgttttttttgacatggagtctcactccgtcgc

SEQ ID NO: 956422 - DNA, 629 bp, Homo sapiens
ctaaaccccattacatcaagttccactaggacagtgaccgtatctgtttcttgtaccagggggtccccaggcccaaggttgtttgaatgaatgaagtctctgcccttaaggaacttatggaagtaagcagaagtaaagaagaattacagaaatacaactgatagaaataactgattgccctgagagaaacaccaaaaagtatactttggaaatttgaagaagtgggagacctggctggaggggtgagggaaggtagcatggcagaggcaccacttgagctgggtcttccttgggaagagatgtaggatttgtacagacaagtgacggagaaggagatgactccgggaagcaatacgcagcctcagaggttgagggaacagaaggagtgtagcttgctgagccttgcaggatccctgaagggaaagagtggaagaaaaccttgtaaactagactagcaccaggtcagagaaggcctgaagaactgcagctatatttggtaggaaatcgagaatcgtctcacattttcgagcacagaaacatcagagccctctctagaaatattaaaagcagattaaagggatgcatacrgacttaactgagacccctgagttacaacagaacttcgggta

SEQ ID NO: 956423 - DNA, 696 bp, Homo sapiens
gtccctactgccactgatgaatccacctgtgggtggtggtggtgaagccatgaggacagctttgggcttggctgggactgctggctcctcgcgatggccctgtcacccctactctgccaggctggcctgctgctgcccacctggggcctgggtctcacccaccttccccggggggcctgatgcctctgcactaggcctggggcctcccattttcctgagagcttggcccgccttgtatcccctgctcccactctggggcggggtccttaccatgccgttggtgttgagacgcaggcaggagccgaagtcagccaggcgaatgtgcccgttcacatccagcaggacgttgtctggcttgacatccctgggggatggcaggcagggagagtgaggcgtttgacctgtgtgtaagtggccatttaggcacacgcccaggtgcacatgcacggtgtgtgccagcaccagctcacacacattcctgtgtgtaggtgctcatgtgatgagcaacgtgtgtgtgtgtagatgatcccacaggccagaaggaggaagatggctagattgtagaaaggatgtgtggggacaaccsttggaggtggcagagtgtgctatgggggacgcaggagtcagacttccccagtgcagaccacagcttgccacccgagagccgagtcaccttgagacaggtgtttccctgtg

SEQ ID NO: 956424 - DNA, 568 bp, Homo sapiens
gggaggccagttaagggcaggtgaccaggaaaagtaaggcacacaagagtaagtttggttaggcacacttaagttgctgctttttccatcgataagcctcttgcgaattatagtcattcttatctttctggtagrgagaaagacactatgacaaaagaagatttattttataaatgtaaacttattttacaaagtgttatttatgctgttttcagagcttctcttaagtctgctgtttctcaaaataatcagctcaaaataatctatatcccaaaaaggcatagttggggtggcatattctggtctcccacaagttccagcaaaagaaagcactgtctaaatgccaggtggaaggatagaaagagaagactagcctttattttgttacctcagtaaatatatgtacttactctactctgatcagtttcactgactgagatgaactgtaatccatttcaaggatgggagagcaggttgcaaacatcgttttgttcaaagagaccaaacaactagaggagacaaaatgttctccacaatgtttccccttccattcaaacctgtctggttt

SEQ ID NO: 956425 - DNA, 590 bp, Homo sapiens
gcggccatattaatatcaaactagatgycaatcaaagcaataagcaaaatcacaatggtagtaaccatctgtgtaaacctcacaaacataatgttgagcaaaagaagccaggcacaagtaaatacatattgtatgattccttttttataaggtacaaaggcaggcaaaactacgttaggttgttagaggacacgatagtggttaccatttggcaggtcatagtactgactgaagaggagctttcagggtgctgataatgttatctttcttgatctgagtgctgataacatggatgtgttcagtttgtaaagttcatcgggtcagcgtttttctatgtgaaaatttctgcagtatattatactgtgagagaaagtttttttaaaagacagtgttaaaatacacagtaacaatagcatgcaatttaggagtggaagataaatgtgtttgaaggtccttttattgctcaagaggaggataaagatatttactacattaggttttggtaaattaaggatgatcttttaatttctaaggaaaacactaagaagattaaaaaagagtatatgtctttcaaagcagtagagggaaag

SEQ ID NO: 956426 - DNA, 612 bp, Homo sapiens
tgatgatccattgaagtttttgatcaaactcatccagagactttggttgctcatgctgttgtttcagatgaccagttataaagctgggtgcacacaagtaacaaccacggtgycatggatttacatcttgccctttttgacctatttctttatgaacatggttcatctgctcataactcttatacccatgcaaccgtcattacctgagtgtttatgcgtgcaaaaatatgtatgttatcactgcctattttattgtgtaatgtacactataaagtgtcctgttgtgtttttatatgtttccaatataaatcccctttgaaatgtaaataaatatgttttaatgaatgttttcattattttttccagaattatattttcaggatttttttttttttttgagacagagctttgttctgttacccaggctggagtgcagtggcccgatctctgctcactacaacctccacctcccaggttcaagcgattctcctacctcagcctcctgagaagctgggattacaggtgcgcgccaccatgcctggctaatttttgtattttttggtagaggcaggatttcaccaagttgatcgggctggactcaaattcctgacc

SEQ ID NO: 956427 - DNA, 574 bp, Homo sapiens
  misc_feature 1, 2, 3, 4, 5, 6, 7, 8, 9, 10, 11, 12: n = A,T,C or G
nnnnnnnnnnnntctgactttagatacctgatgactatgtgcctgaatgatgatctttttgtgattaatttcccaggtgttytttgagcttcttatatttggatgtctatacatccaaatcacttgtgaggtcagggaagttttcctcaattattccctcaatatgttttccaaacttgtagatttctcttctttctcaggaacaccagttatttttaggtttggctgtttaatataatcccaaatttcttggaggctttgtttatttttttaaattcttttttctttgtttctgtctgatcgggttaatttaaagaccttgtcttcaagctctgaagttctttcttctacttgttcaattctattgttgaaatttttcaatgcattttgtatttctctaagtgtgtctttcatttccagaagttataattgttttttcttaataatgtctatttctctggagcatttttcatccatatcttgtattttttaaaaatttccttaaattggttttcacctttctctggtatctcctcgagtagcttaataatcaactttctgaattctttacctg

SEQ ID NO: 956428 - DNA, 473 bp, Homo sapiens
agagactgagacaagtttttgagcaggagtgaaagtttattaaaaagctttaaagcaggaatgaaaggaagtaaagtatccttggaagacggtcaagcaggcaacttgagagatcaagggyattgtttaacttttgacttagggttttatatgttggcatccttccggggtcttgcattacttctcccctgattcttccctcggggtggcctgtccatatgcacagtggcctgttagttcttggggggtgcagcatgcccagtgtgtttactggagctgtacgcatgctcacttgaggcagtcttcccttactagcccagtgttcctagatggtcatatactggttaaactctgccattttgcctcttagtgcgcatgcttgagctcacttgcccaactcctgagatcttattgggaagctgctgatcaccagtttgaggttttcctatctactgagagactgccgttctctg

SEQ ID NO: 956429 - DNA, 619 bp, Homo sapiens
cgcatccaagaagaatgagattacactgacaactggatggtgaggagggcagagaagagttttattgagtgacaaaacagctctcagtggagaggggacatgagggtggtccaccacctgaagtcaggtggtctctctctcagtgtggctgggtccggggcttttatgggctaagaattggggactgcatgctgattggtttgtgagtatgcaaaaaaggctaaaacaaaagtgccactcaaaggtgggcacaacagtgtaataaactaattagggaagggcaggcatatgtaaaataggtgaagagtggggatcaatcagaggaaagtgtgccaaacaagaagaaaggttctcaatccagtccgtggatttatctgggacttatggctgggctttaaactgtcctcggcttgaaggtggggttccactgggaacccatccctgtctgcctaggatttgtctgcctcctgccactatccattcattcctctagggtttgttgagtgctggctctgtgccagccacyccccaaggcactgggggtatagcagtggagtagacaaatctctgtcctgttggagattgtattctagaggggaggtggttggcagtcaaacga

SEQ ID NO: 956430 - DNA, 616 bp, Homo sapiens
gagacttaaaagtcataaaaatcaagtatgagaagcagctcttgtttggatcttgacctgaacaaaccaaaaaggcaattatcaggcaatgggaattttgagacaactgaatatggactgggatttggcgatattaaggaagtattgttgtcaggtgcggtgactcacgcctgtaatcccagaactttgggagcccaaggcaggcgaatcacctgtggtcaggagttccagaccagcctggccaaaatggtgaaaccccatctctactaaaaacacaaaattagccaggcacagtggcatgcgcctgtagtcccagctactcgggaggctgaggtgggagaatcacttgaacccaggaggcagaggttgcagtgagtcgagatcacaccactgcaatccaacctgggggacagagcgagactctgtctcaaaaaaaaaaaaaaaaaagtattgttaattcagttaggggtgataatgattttgagcttatgtaataaaatgtccttttttattttttagacacacaaatcagaattagttagaggttaactaatatgatgacatgacagggatttaaatactattgcaatytgaaaaaaaaaagaaaaggaaagag

SEQ ID NO: 956431 - DNA, 586 bp, Homo sapiens
ttaaatagcattgagtctattgttgtatcaaataacattccatgtattagtaactaagagccagaatcacagctctgcggcattaaggatccagagtcctttttatgtttatctttgatatctgtgggttttgtcttttttaaaattatgttcataaagactcttcaccggtgtacattcctgccaacaagaatggaataaagagaaaaaataatgttgtttttttttttaaaaaaaaggtcagaaaacataattgcctacaccacctccacttcgtcctgctagccatatccataatctactgtcaggacagtctttacatgaatattcatatgtccagccccagctagcaactctattgccatagaagaatgcgccaaaaatgcaaaataacttgccatctctgtcaaagtgttgaacacaatctaaaatctagggttgctctgaatttctgakagtctgttagtgttgattgttatactacagtctcaataaaaatggaatctatgtgttttcatgcccagaattggtgtatgcatatacgttgaaagaaaaatgaatttacagtgaccctacttagcttcag

SEQ ID NO: 956432 - DNA, 586 bp, Homo sapiens
ttaaatagcattgagtctattgttgtatcaaataacattccatgtattagtaactaagagccagaatcacagctctgcggcattaaggatccagagtcctttttatgtttatctttgatatctgtgggttttgtcttttttaaaattatgttcataaagactcttcaccggtgtacattcctgccaacaagaatggaataaagagaaaaaataatgttgtttttttttttaaaaaaaaggtcagaaaacataattgcctacaccacctccacttcgtcctgctagccatatccataatctactgtcaggacagtctttacatgaatattcatatgtccagccccagctagcaactctattgccatagaagaatgcgccaaaaatgcaaaataacttgccatctctgtcaaagtgttgaacacaatctaaaatctagggttgctctgaatttctgagagtctgttagtgttgattgttatactacagtctcaataaaaatggaatctatgtgttttcatgcccagaattgktgtatgcatatacgttgaaagaaaaatgaatttacagtgaccctacttagcttcag

SEQ ID NO: 956433 - DNA, 605 bp, Homo sapiens
tccccagaatatggatttttcttttctatcacatattcaggctgcatattttccaaactcttatgctctgcttctcctataaaactaaatgcctttaacagtacccragatacctcttgaatgctttgctgcttagaaatttcttctgccagatactctaaatcatctttctcaagttcaaagttcaacaaatctctagagcagggacaaaatgccaccagtctctttgctaaaacataacaagagtcacctttactccagtttccaagaagttcttcatctccatctgagtccgcctcagcctggaccttactgtccatatcgctatcagcatttttggcagaaccactcaacaagtctctaggaagttccaaattttcccatattttcctgtcatcttctgagccctccaaactgttccaacctctgcctgttacccagttccaaagttgcttccacatttttgggtatcttttcagcaatgacccactctactggtaccaatctactgtattagtccattttcacactgctgataaacacatacctgggagtgggaagaaaaagaggtttaattggacttacagttccacatggctggggaa

SEQ ID NO: 956434 - DNA, 611 bp, Homo sapiens
gtttttgttatatattttattttgagtaactttgtggtttctgattttcaaggatgtggttcgtattttcaacattgataagtttgtgtgcataatgttatctggattttttwaaatatttttattagctgtacaatctgtgctgatatctcttctttcaatcctgatattggcaatatgtgtcatctctccttttttcatcctgagtcttgctggaggtttaatcattgtattcttattccaaataaacttcatttaaaaaaattttctctattttgttctgttttcaatttcattattatccttttattttatattgttttcttcctcctgcttaatttttgcttattttgctcttgtttatctagtttattaggctatcccaaagagtaattgtgaatttgttccaattttttttgtctgtcagattttgctttatatattttgaagcactttttcaagttgaatgcacatgtaggattgtcatattttcctgcttaattggcctttttatcattatgtaatattctattttacatcttttaatttcatttgttctgaaacctacattttctgatattgacatagccactgcagctttcttttgatta

SEQ ID NO: 956435 - DNA, 611 bp, Homo sapiens
gtttttgttatatattttattttgagtaactttgtggtttctgattttcaaggatgtggttcgtattttcaacattgataagtttgtgtgcataatgttatctggatttttttaaatatttttattagctgtacaatctgtgctgatatctcttctttcaatcctgatattggcaatatgtgtcatctctccttttttcatcctgagtcttgctggaggtttaatcattgtattcttattccaaataaacttcatttaaaaaaattttctctattttgttctgttttcaatttcattattatccttttattttatattgttttcttcctcctgcttaatttttgcttattttgctcttgtttatctagtttattaggctatcccaaagagtaattgtgaatttgttccaattttttttgtctgtcagattttgctttatatattttgaagcactttttcaagttgaatgcacatgtaggattgtcatattttcctgcttaattggcctttttatcattatgtaatattctattttacatcttttaatttcatttkttctgaaacctacattttctgatattgacatagccactgcagctttcttttgatta

SEQ ID NO: 956436 - DNA, 677 bp, Homo sapiens
atttatagcttgggttctgaactgagctactttgatatgaatctaaaaagacatgccatattaaaatatgcctttagtctacagccaattaaagaaattagtgttaaaagaagaaatctgggtgattctgagatttagtttataatctgggaggagtgcaaatattattaatattataaattagtagtatgaaccataataataaaaataataaagcttctcatgtaaactccccaaatataataattgttttataggtatctgactcagggcagaaaatagatcagctttataatattgactgtctaatgactacaacttcctttgttttaataaaaaattaagatggccaaataacaatgaaattgtgacattcaaatatacttttcaattataagcactgaggcaccccaaactctgtgggcacaactttttttgttttactccaactttaacaatatttttttttaatcactcaaataaagaattaaattaaccaagtcaagatggattaaagacttaaacataagacctaaaaccataaaaaccctagamgaaaacctaggcaataccattcagaacataggcatgagcaaagacttcatgactaaaacaacaaaagcaatggcaacaaaagccaacattgacaaatgggatctaatcaaactaaaaagctt

SEQ ID NO: 956437 - DNA, 617 bp, Homo sapiens
ggtgcctacccagattaagggtgggtctgccttgcccaacccactgactcaaatgttaatctcctttggcaacaccctcacagacacacccagaatccatagttttcacccttcaatccaattaagttgacactcagtatcaaccatcacaattattattactttgcatgtgatttttattataattttattatcataagacaagggattctcatatcataagagaatacacatgaaacagttttagttggagtttggtctttgccaaaatccaattaaatattttaagaagatagaacactcagttgaacaaatagccaagaaggaatttgaggagagtaggaatttgatagcacttttctcatctttgctctacattcttgtatttgatatagtgaggcaagatgaagtagaaaacttcctaatttctggatcctccatcaggaaggaatgaaaagaatgaaacttgtgtttaacattctggattttcctggagaatgttcaaggaattggtttctgttctacctgatatgggccattgatggtaatcattgtataccttggamaccaagtaggaggtctgtagtgccatggagtattaggacaatgaggagttg

SEQ ID NO: 956438 - DNA, 557 bp, Homo sapiens
gagacttgtctcagatacgttttggttaacacagtaaagatttttatgactggccaaatctttatttcctgaaggtgatatgacccacttttttaggaatccatgaaaaattttggagatccgcaaatgcatttactatctgtaaacatagaatattatcttctattgtgcataaacatttctcaaaatgttcacaccctatttctttaaagaaaatatatatcctctacacctgtttgtgttccttaataacatataattgtctccttgtgaaatcatgcacttctagactttccagatattcctcaccttctgaacttttatattgtgttttcttgaattaattattaataaagtctacaatattcttaatttttcacaaatttattatttattgtttattcccttaagtgtgacctgtctctgcctgtgttagttacatattgctgcaaattatctcaaatgtagtggtttatgagaacaaacatttattatcatccaatttctgtggtcagaaatttgaagctggcttagctargcaactcaatgtctttcat

SEQ ID NO: 956439 - DNA, 631 bp, Homo sapiens
caagattataggcatgaacccccacatcctgctgatgagtttagatatatgcatacatccttaataccttaaaccaaggtactaaatagattcactacacaattctcttgtctttatttattgagtttgtttttctttttttttgttttcagtcttttttcccccctttggtaagagtacttaacataagagttatcctctgaatatattttgaagtgtacaatactgtatcgttaactataggtactttgttatacacagatctccagaacttattcatctttcatcacagaaattttaaacccattgagaaacaattatccatttcttccaacctccagcccctagcaactacctctttattatctgcttctatgtgtttgattatttcagatacctcatattagtggaatcatgcagtattttgtccttttgtgactggcttattttacttggcttagtgtcttacctatgttgctgcaaatggcagaatctcatttctcaaggctgaataatagtctgttgrgtgtatataccatgtttcctttacctgttaattcatcaatagacccttggattgtttccgtatcttggcatttgtgaataacactgcagtgaacatgggtgcacc

SEQ ID NO: 956440 - DNA, 483 bp, Homo sapiens
aatatcataagcagttgagggactaggaagtggggagatcaggaagtaggtcctctagagatgaggaggcactctgctagatggcttttaaaatatttcctccagaggaatttgcctcattaacagcattttttggtcttaaaaatcagtctttgattttatacaatgacaatttctgactctgttataaaggtatgctgtcctagttcttccgtaagttcatcacgtgttttcaccatgttgtcattaggcatgttttctgcagtattaacatcgtcttcattgttcctattatcataattaccatgattcttaaaaatgtcagctagttctccattggtcaatgaacgaacaactggagcctcaktatcaacattaaaaatgtcttcaatatcaatttctttcagtttatcggattctgaaggtatactttttgtatatttaaggagataagacatctttttttcctcacttatcatatag

SEQ ID NO: 956441 - DNA, 605 bp, Homo sapiens
gacaggaaaatgtgggaaagtttggaacttcctagagacttgttgaatggctttgaccaaaatcctgatagcgatatggacaataaggtctaggctgaggtggtctcagatggagatgaagaacttgttgggaactggagcaaaggtgactcttgttatgttgtagcaaagagactggcagcattttgcccctgccctagagatttgtggaactttgaacttgagagagatgatttagggtatctggtaaaaaaaattcctaagcagcaaagcattcaagagttaacttgggtgctgttaaaggcacttagttttacaagtgaagcagagcataaaagttcagaaaatttgcagcctgacaatgtgatagaaaagaaaaacccattttctgaggagaaattcaggctggctgcagaaatttgcaaaagttactaggagccgaatgttaatctccaagacaatggggaaaacgtctccagagcatgtcagaggtcttcacrgcagcccttcccatcacaggcccagaggcctaagagaaaatggtttagtgggacaggccccctgtgctgagtgcagtctagggacttgatgccctgtgtcccagc

SEQ ID NO: 956442 - DNA, 635 bp, Homo sapiens
gcctgcatatcgtgcagagccatctgtaaacagggcccttgtcttctcttcctgttaattgatcctggggaactcccyatgagaccatcagtgcaggctgggggcagagaaggcagtgtggcgggaatggggatcatgagcatttgagccacttcctcatataacttactttgtgccctcaggagttgctcaagcctgatcacatatatgccacttccatttgatgatggaatgctgctgtgcatgccccactttatggctagacaagtcagaaagcactcaattcatgataggtagttcaggtcgcatggtgacttgatgacccatagccaaccgtttagtttctaccaaagtccagtaacagggcaagagctctttctaaaaaggaaagtagttatctgcagaagatggcagggccttcctccaaaatcctagaggcctctgctgtgattcatctatgggggacttccaaaggctcctaacagcatccctctctgctgctgacacctcaagcacaattagatctgctctgttctatggcccaagtgacagagcaacttgcatagcagtttggacctgttgcagagccttctcctgtcctggaccccactcaaaactggaagcctttcaggtct

SEQ ID NO: 956443 - DNA, 821 bp, Homo sapiens
ctgtgtcaattatgcattctggcactggggaaatgaatgcaggatgagtgtggggacccactggagccactgtaagttgaacctgagctaaagctccattaattacatgacctccataagcccctactataactggaggatcacaatgactttttgggtcccctggaatcaatgtcagctcagagtcagtgtccagtagttcccaaaaggtctgatcattttttctttctttccccaatccagttacctggtaaaaggccagaggtctccttgaggaaggatgggagaaagattaacaacataaattgtcagtagtatagtgggatccttctttaagaggacctggcctccttttcattcaaggggttctgggtctgtaaaatggcatatgtctggaaattgatagtggggctgcgattctctgtttttataattcaaattagtgttttgtccactcgacctggaagttttctgcttatgtaaattaagtaagaattcggtaagcttcctgtcaatttcacttctaggaacgctgtaattaattagccaataccagagctctacacaagtcagactattctgattgctgctttgcctcttctgtctattatggtagctatgcctacctttcctttgatggctgagtgctgccatttggcccctgctgtctctagatccaattatttttattgcatttaaattttgtagttgagtgactacagtttctactgtaagatctgrcatacagagaaaggcaatcacagagctcttcaaggatgcaagtgctgccctctcaaatctatttcacaaagtactggtca

SEQ ID NO: 956444 - DNA, 576 bp, Homo sapiens
acagggtctatgtgcctgtacctattaggtgcccaaataagattctaaatgacagaatgagtcaaagaatcctgggtttggaccatgggaaagtggtaaaatggtgtcagagggatgtcaagaggaagagctggttttggagggaaagttgttgagttcaattcaacgctacagagagtcagagatagcatgcagacctcagaaccaaagtgttgagacaatagacatggtgggattttactcgctgattattttcagagaccaccctattttggatgtgctagttctcgacttttctagaatcagtattataaaccagataatctgtgaagtaacccaaggaaaggggctccagtaggatagggattgaggatgttcataaactaaggatgaagaaggagaaagaaaatcagttttttacagattttccacctgcgttacaaagcacccaaaacctttcagcttctgggaagtggaaggccatgccttccaggcatgcactgaggtctctggggcatgttacacacatctatgtaagtgactcactgcygttagggcatgcgctaggtccaagaa

SEQ ID NO: 956445 - DNA, 563 bp, Homo sapiens
gttaccaatggatgagtgaataaattgtgtgtgtgtgtgtgtgtgtgtgtgtgtgtaatctggccttagaaaagaaagaaatccttccatttgtgagaacatgaatggatctggaggatattaagtgaaataagccagacacagaaagacaaatagctgtactgtatgatctcactatgtggaatctaaactcttaaattttttaccattttatttatgtatttatccatctcagcaatatttttttaagttacataattttattttttataatttcaaattttattttagattcaggggtacacatgcaggtttgaaacatgggtatattgggtgatgctgaggtttggggtatgattgattccatcacccaggtagtgagcattgtacccactatgctttttcaaccctttccccctttcttcctcycccttttgatagtcttagtgtctattgttgcaatctttatgtccatgtgtgcacaatgtttaactcccacttacaagtgagaacacgcggcatttggttttctgtttctgtgctaatttgcctaggataatggt

SEQ ID NO: 956446 - DNA, 655 bp, Homo sapiens
aacagctgcagaatgcacgtatttctcaacatcacatggaatattcttcaggataaaccatatgttaggtaaaaagcaggtcttaataaatttaaataaatgaaaaccatatctagtatcttttctgaccacamtgatataaaactagaaataaataacagaagaatattggaaactgtacaaatttatggaaaataaacaacatgctcttgaatgacaaatggatcaaggaagaaatttcaaagcaaatattaaaatttcttgagataaataaaaatgaaatcacaacataccaaaacctatgggatatggcaaaaatagttctgaaggaaggttatagcgataaatgtccacatcaaaaaaggagaaagacttaaaataaacaaactaatgatacaccacaatgggcttaaaaaaaaaaaaaaaaaaacaagaacaaatgaaaagaaaatcttccaaacccagcaagagaaaaaaaaataaaaataaatatcagagtagaaataaattttagactaaaaataatgcaaaaacatcaataaaacaaaaagttggcctttaaaaaagatagaattgagaaactaactagaataactaaaaaaagagaagattcaaattaataaaatcagagatgaaaaaagagacattaaaattg

SEQ ID NO: 956447 - DNA, 534 bp, Homo sapiens
tcccagcttccttagtcttcaccatctggtaggtcacamtggtgcatacggtgctgcctgagcccatgtcatagaacatgatattctgtagagatatcaaggcaactgtcacaggaaccttctcaaactccagggggcctgcctgcccacccacctgcttccaatgggctgtctgactcttaacacaaaactaaacagctccaacaggggctgggaggaggctattggtgcattttgccaagggtcagcccagcccatgcaaaccagatgcaaaagggaccaagtggcctccatccttagattcagtcaccctgcatgtctggtcaaggctcccctggctcacctgggcagtggtgttaatatctttccggcggaagacaccatagctgagggcagtggcggtgttgtcattgatgagctgcagcactttgaggccagccatacgagcagcctgcagcacagctcggcgctcggcctgattgaagaagactggcacgttgatcactgcatccttgatgggctgctctacagatg

SEQ ID NO: 956448 - DNA, 643 bp, Homo sapiens
cacagtaagtcgtcacttaacctccctgagaggttctaggaaacggcgtctttaatcaaaatggcaygtaaggaaaccaattttacctcaggctaattgagataagcaagagtcaaattcctgttgaggcagccagttgagagagggtccccggaaaaacttcaaccaacccgcacactgaggtggagcctttgggacttttgcagcggggaggagcctggcccctcctcttcctgtgtggaccctcggattcaagctgctggcgggaagtgcgctaggcggagctgtggtctagcgagagtccctgtttcccccttttcttccttttcacaggatctcaccccataaaaccctgtcttaccattcaaattgtctgtaagcctgaattttcgcggccctaagacaaagaaccttgtctttcactgaatttaaaaaaagtcctgcaacatttttggtgcacaacgtgggggttcgagaagcggtgagtgaaatggggactcaaaacctttcactgtggtttataagcctttctatcctccaacttctgagattagggggaaaatgcccccaacccctgtataggggtcgggaaagacaggcgagtgggggctccttgctccccctcccctatgtgcctgggcta

SEQ ID NO: 956449 - DNA, 630 bp, Homo sapiens
acatgagatgggtctcttgaatacagcacaccgatgggtcttgactctttatccaatttgccagccttttaactggggcatttagcctgtttacatttaaggttaatattgttatgtgtgaatttgatccgtcattatgatgctcgcttgttattttgcccattagttgatgcagaaaaacagcaaattttacctcaattaacaaatcttctggtgatgaggttcatttatacagtaattagtggacattaaaataaaggaagtggcttccttgctgggcttggaggtggtgtattaatctgttttcatgttactgataaagacatacccgagaccgggcaatttacaaaagaagaggtttaatcagactcacagttctacatggctggggaggcctcacaatcatggcagaaggcaagaaggagcaagtaacatcttacatggatggcagcaggcaaagagagcttgtgtggagaaacgcctgttttaaaaaccatcagatctcatgagactcattcactattgcaacaacagcgcagtaaaggcctgcccccataattcaatcacctcccactgggttcctcccaygacatgtgggaattgtgggagttacaattcaagacgagattt

SEQ ID NO: 956450 - DNA, 646 bp, Homo sapiens
aggtcagtgcccctctgggatagacatcccagaggaacgagcaggcaaccatctttgctgttctgcagcatacactggtaacacctccaggggtggaagggacccaggtgaataggctctggagtggatccccagcaaaccgcagcaaccctgcagaagaggggcctgactgttaaaagaaaaacaagcagaaagcaacagcatcaacaaaaaaaagtcctcacaaaaatcccatccaaaggtcagcagcctcaaagaccaaagctagaaaaactcacaaagaggagagagaatcaatgataaaccactgaaaactgcaaaagccagactgcctcttctcctccaaatgatcgcaacacctctccagcaagggcacagaactgggaggaggctgagatggatgaactgacagaagtaggcttcagaaggtaggtaataacaaatttcgctgagctataggaacatgttctaacccaatgcaaagaagctaaagaccatgataatacattacaggagctgttacccagaataatcactttagagaggaatactgaaaaaygcaacatgagaacttcacaatgcaaccacaagtatcaataactgaatagaccaaacaaaggaaagaatttcagagcttgaagacttt

SEQ ID NO: 956451 - DNA, 612 bp, Homo sapiens
taaccaccttcaaagggcctttattctatccttctatctaccacctaactgataaggctgtttggcatgcccacggcactgaatcctaccacaccagcttgcctagaatgtttatccaaacactgtgatttacactggactggaatttcagtaattgtggctgatcacataggcatcctctgcctatttctgcaataaaatcccaggactctgagcctccagtcagcttccctagtcagaaatattgtgtatgtgttacttaattttattgctggaagaaaaagtgtgttctgtgtaatccacctcctgcaccagacacaaagctttggaagcctgcacttaaactcctccagactgatgtgactttttcccttgttgatgctgtcttgtatcctttgatcacctataaccatgagcacaactgactctgagtcctgggagtccttctagtgagtcatcaaacatgtgggtggccagaggactcctccccctcccccagacaaggctgatctaagattagactcaattgggacaatgaggctcccctctcatgatttctcwtcctccagcaggctagtccaggcttgcattctcatgagagggttctgaaac

SEQ ID NO: 956452 - DNA, 431 bp, Homo sapiens
cctctcttgaaaacctaataaactcaaggtcatggaaaacattgtctctaagaacatatggctaaaagagaaagaagaggcactcagttagcttggattttgaagggttttaccaagagaacactggagtggttttatttgaagtaattacaagaacttcaagccttctaagtggcacaagccttgcctttagtgcagataagcctgtcattttttagtgctaccagtgggattcttttgtgggcagcatctgccttaagtgaaatcctgatccttcaaaagcacaactttcttcaagagaaacaggtgaaataggaattgtcaaaacccagcgttccctgcccaccctcccccaacttttctccttatcagcccccaacctatggtatttacaaatcaaatctcgtgtrtgtgtgtgtatttttagtaaa

SEQ ID NO: 956453 - DNA, 614 bp, Homo sapiens
gggttagtaataaaattaaggaagaaatcaattagttctttgaaaccratgagaacaaagacaaaatgtaccagaatctctggggcacagctaaagtagtgttaaaagggaaatttatagcactaattgcccacgtcaaaaagctagaaagatctcaaataaacaccctcatatcacaaactaaaagaactagggcaccaagagcaaccaaacctcaaagctagcagaagacaagaaataaccaagatcagagtggaactgaatgagatagagacatgaaaaccccttcaaaaaaaaaaatcagtaaatccaggagctgttttttggaaagaaaaataatcaaatacacagctagctagactaataaagaagaaaagagataagaatcaaatagataaatgatttgataaaaatgataaagaggatatcaccattgaccccacagaaatgcaaacaaccaccagagaatatgataaacacctctatgcaaataaacaaaaaaatctagaagaaatggataaattcctggacaaatacaccctcccaagactgaactaggaagaagttgaatccctgagtagaccaataacaagttctgaaattgaggcagcaat

SEQ ID NO: 956454 - DNA, 579 bp, Homo sapiens
acattttatccaacagctacagactacacattattctcatcagcacatgaatagaccatatgttaggccacaaaacaagtctcaacaagtggaataaaactagaaatcagtaacaagagaaactctggaaactgtacaaacacatggaaattcaaaaacacactcctgaacaaccactgggtcaatgaagaaattaagaaggaaataaaaaaaattcttgaaacaaataaaaacggaaacataacataccaaagtcaatcggatacaacaaaagaattggtaacagggaagtctgtaacaataaatacctacatcagaaaagctgaaagattccaaataaagaatctaaagatgggcctcaaggaactagaaaagcaagaacaaaccaaacccaaaattaatagaataagaaaggtcatagcaaaactaaacaaaatagagaccaaaaagtaaycatacaaaggattaatgaaataaaaagttagtttgttggaaaggtaaagaaaactgataaactgttaactacagtaaccaagaaacaaggagagaagactcaaataaataaaatcagaaacaaaa

SEQ ID NO: 956455 - DNA, 579 bp, Homo sapiens
acattttatccaacagctacagactacacattattctcatcagcacatgaatagaccatatgttaggccacaaaacaagtctcaacaagtggaataaaactagaaatcagtaacaagagaaactctggaaactgtacaaacacatggaaattcaaaaacacactcctgaacaaccactgggtcaatgaagaaattaagaaggaaataaaaaaaattcttgaaacaaataaaaacggaaacataacataccaaagtcaatcggatacaacaaaagaattggtaacagggaagtctgtaacaataaatacctacatcagaaaagctgaaagattccaaataaagaatctaaagatgggcctcaaggaactagaaaagcaagaacaaaccaaacccaaaattaatagaataagaaaggtcatagcaaaactaaacaaaatagagaccaaaaagtaatcatacaaaggattaatgaaataaaaagttagtttgttggaaaggtaaagaaaactgataaactgttaactacastaaccaagaaacaaggagagaagactcaaataaataaaatcagaaacaaaa

SEQ ID NO: 956456 - DNA, 750 bp, Homo sapiens
gttcggagccggatgtcagagtggagatgagctgcatgagcccctgcaccaggcagtgaggaccgccctgtgcactggcaaagggcagcacagaccccaaactcgctgggtgcagggctcaaagcctcacctcctgattctacaaattagtcacattgaggcttcaaagggctgaactaaggaagggtgcatggtgaggtggagagtgaagaggtggggacctgcggggaacttctctgcccaagctgggtctgggacacagtagccacctgtgatctcagtggctgggcggtggggtagccacctttctggcatgtgaattgctgtggatttcggtaaaatgcccactccagtgcatctctcacctcctacattatccttcggatttttcatttggtgagagctgatgtatggtgactcctcactccccaatatcattattcgattaaagcacatctttgagccagcaactgtagatcatctggctgctgggagtccgcaggcagcttgacagaggctgtggcattgggaatgggtcctgtacctgcccacctgggcctctcacgtgcctagtgggagcactcccacgagggacccccatcctctgcacattgctggcaygatgccctgcctggacagcctccctggaccctccccaggctgctttccagcccctcccactgttagagtctgaaacctggcagggaggttttgggacagagcccactctagagctggctcgctctgggc

SEQ ID NO: 956457 - DNA, 616 bp, Homo sapiens
acttagaaaatgagttatttctactcaatagaaaagaaatattgtggaaaaagtatgcatctgaaatgagcatgaggccttctacattcattcagcacaattttrgacctttgattttgctcagggctctctgtaataccaatctgtctcagtgcctggcgagtttcagatccttttctgtttatctcatgtatcttgttctgagctcatccctaagacatcacaagagatattgatttcttgacttccggacacatagtgttccttacaacatgcctgtcctcatcctctgaaattttctcctctggtccttttgagcaaccatccactgacccaattgaatcccccatgaccctcctatatcaaactgcataagggtgtagaacaggacggtcacaatgtaccatggagattttaaatcctttgtaaaatatagaaaacagtaaccaaataaaccccaaataaagcagatcaacagttttttaggtaaagcaacctaaaaactaacctgtctacaaaaggacaagagtaaagttatcagaggcatttgaaccaaagtgactccattttgagtgagggctaggaaaatgaggccgagacctgctgggctgtattc

SEQ ID NO: 956458 - DNA, 701 bp, Homo sapiens
gcgcccaatctgccagtggcagagaccagccctgagmccccgatacagcagcatttcccgggggcatcaacctgatggcaagttgattacattagactgcttccatcgtgaaaggaacagtgtttgttcttgctggaatagacacactcactgttaatatatttgccttccctgcatgtaatgcttttgtattcattgatttacagaatggcttatccaccctcatggtattctacacaacattgcttctgatcaaggaactcacttcatagcaaaactatagtagtgggctcatgctcagggatttaactgatcttatgttccccatgatttttaggtagctggcttgatagaatgatgagatggcctattgaagactcatttatagtaacagctaggtacaataccttacaagacaaggcaagattctacaacagaatatatgtgctctaaatcagccttaaatatatggtactctttctctcacagcaggattcatgggcccaggaatcaaggagtagaaatgggagttgcaccatccactattacccctgaagactgactagcaaaatttgtgcttactgtgcccacaacttaatgctctgctggcctggaggtcttagttccaaagggagggctactgccaccaggaaacacaataattgatccgttgaaatggaagttaagacttccaccctgcc

SEQ ID NO: 956459 - DNA, 561 bp, Homo sapiens
tataacgtttggtagtttatgtgtattaaacgcatttttgacttagaatattttcaatttacaatgggtttatcrgaacatatataatctttgtttttttctctcttatccccataggtaacataagatctattaactttatagtatagtatttaagtattgttaaattgacataatagtgtttaagttatgagatatatcagatatgggatatcaagaggaagagtaactatcactcaaggactttgcattcttttgggggaacgagttattccattttcagttgtacataagacagttggatcgtgttaggtggaagtatgacattgttattgtatttatttgtaggttaagtatgctttaaggagattcatatggttgccaagctgaccaggagtggacttgtgatggttaatcttatgtgccaactaggcttggacacagtgcctagacatttgatcaaatattattctaaatgtttatgtgaatatgtttttgaatgaaatcaacatttaaattggtggactttgagtaaagcaaaatgccctccataatgtggat

SEQ ID NO: 956460 - DNA, 561 bp, Homo sapiens
tataacgtttggtagtttatgtgtattaaacgcatttttgacttagaatattttcaatttacaatgggtttatcggaacatatataatctttgttttyttctctcttatccccataggtaacataagatctattaactttatagtatagtatttaagtattgttaaattgacataatagtgtttaagttatgagatatatcagatatgggatatcaagaggaagagtaactatcactcaaggactttgcattcttttgggggaacgagttattccattttcagttgtacataagacagttggatcgtgttaggtggaagtatgacattgttattgtatttatttgtaggttaagtatgctttaaggagattcatatggttgccaagctgaccaggagtggacttgtgatggttaatcttatgtgccaactaggcttggacacagtgcctagacatttgatcaaatattattctaaatgtttatgtgaatatgtttttgaatgaaatcaacatttaaattggtggactttgagtaaagcaaaatgccctccataatgtggat

SEQ ID NO: 956461 - DNA, 595 bp, Homo sapiens
gaagtattttattttctattttttggaagcatgcatgcaaaattgatattatttttccttaaatgtttagtagaattcaccagtgtcatctaggcatggagctttttttgtaagaagaatatcaattatgaattcaatttgtttagtagttttaaggctatctatctagttctctgtgacttgttgaggaatcttttgtcagtttatgtatttcaaggagttaggccactacatccaagatgttgataagcctatagtttgctcataatattaccttttaatcattttaatgtctgtaaaatctgtatttatgtccattttcttcattattgatgttgggtatttatgtgttttatttcctgattagtccaattaatgctttagcattttttccctctgttcaaggaaccagattttagtttcattgatgtactttatttttttctctttttcttgatttttttcactcaactttattgtcttccttctaattacgttgggtttaatttgtttttctatttttgtttcttacagagaaatcttagctcactggtttttagatckttattcatgctgtatagttcccttgaaacac

SEQ ID NO: 956462 - DNA, 599 bp, Homo sapiens
ctaacatatacagtggggtgttaaagtctcgcaatattattgtgtgggagtgtaagcctctttgcaggtctccaagaacttgctttttgtatstgggtgctcctgcattgggtgcacatatatttaggacaattaactcttcttgttgcattgatccctttaccattatgtaatgtccttctttgtcctttttaatttttgttggttgaagtctgttttatagagactagaattgcaacccctgcttctttttttttctttccatttgcttagtaaaccttcctccatccctgtattttgagcttatgtgtgtttttgcacatgaccactgttctgtgtagtgactgcattgtgctgggggtccacacaagacccccttgcccttttactctccagagcctggaggcagcaaaggcaaagactgcaaaacagcaaagatggcagcctgcccctctctctgggggctctgtctcaggcagctatagagcccttgctggcccaaaaaccctggtggcccaaaagtccatggttgggaggtcctgctcagtaaggagaaatgggaccaggaaactgtgtaaaacagtctggctgtttttcca

SEQ ID NO: 956463 - DNA, 599 bp, Homo sapiens
ctaacatatacagtggggtgttaaagtctcgcaatattattgtgtgggagtgtaagcctctttgcaggtctccaagaacttgctttttgtatctgggtgctcctgcattgggkgcacatatatttaggacaattaactcttcttgttgcattgatccctttaccattatgtaatgtccttctttgtcctttttaatttttgttggttgaagtctgttttatagagactagaattgcaacccctgcttctttttttttctttccatttgcttagtaaaccttcctccatccctgtattttgagcttatgtgtgtttttgcacatgaccactgttctgtgtagtgactgcattgtgctgggggtccacacaagacccccttgcccttttactctccagagcctggaggcagcaaaggcaaagactgcaaaacagcaaagatggcagcctgcccctctctctgggggctctgtctcaggcagctatagagcccttgctggcccaaaaaccctggtggcccaaaagtccatggttgggaggtcctgctcagtaaggagaaatgggaccaggaaactgtgtaaaacagtctggctgtttttcca

SEQ ID NO: 956464 - DNA, 639 bp, Homo sapiens
aactgctgtgaacattcttatacaagcttctatgtgctcaaatagagattctctccagggcagtgacttttaaagtgttattcttcaacctctagggaaatcctcaagaccctttgagggacttcatgaagtcaaaagtattttcacaataatatgtaagatacaagttatctttttcatactggcatcacattgctggtacaaaagcaacagttggtaaaattcctggtgacctagccgagttaacgctataattaatgagacatacgaacaccatgtacctcctggtacgatgcactaacaagggcaaaacatcatttctatgatattcttgccgaaaatacataatctgaatttaatcatgaaaaagcagcagaaacacccaatttgagagataacaagattgtttttcattactttgacactgactaaagactgaggaactcacccagattggaagagaccactaaatgcaacgtgtgatcttggatgagaaaaagaatactagtaggacactaataataaccactgcatataatttgaataaataaaatttgaataaggtgtatagattagttaatacrgtattaccgtattagtgttaattttctggttttgatcattgtacttgctaagata

SEQ ID NO: 956465 - DNA, 826 bp, Homo sapiens
attttgggctgacactttggkgttttctagatatagaatcatgtagtctacaaatagaaatagtttgacttcctctcttcctatttgggtgccctttatttgtctctcttgccagatagctctgggtatgactttcaatactattttgaatagaagagatgagagagggcatatttgtcttgtgctggttttcaaggggaatgcttccagcttttgcccatttagtaaaatgttggctatggatttgtcatagatggctcttattattttgaggtaggttccttcaatatctggtttatggagagtttttaacatgaaagggtgttgaattttatcaaaagccttttcttcatctattgagatattcatgtggtttttgtttttagttccgtttatgtgatgaatcacatttattgatttgtgtgtgttgaaccaaccttgcatcccagggatgaagcctacttaatcatagtggattagtctttcgacatgctgctgaactgagtttgcaagtattttgttgaggattttttcatcaatgttcatcaaggacattggcctgaagttttcttttgtgtgtgggtctctgccaggatttggtgtcaagatgatgctggccttatagaaggagttagggaagagtccctcctcctccattttatagaatagtttcagtaggaatggtaccagctcttctttgtacatctagtagaattcggctgtgtttccatcaggtcctgggctttttttggttggtaggctatttattaccgagttaattttgtagctccttgttgacctgttcaggtaatcaatttctttctgg

SEQ ID NO: 956466 - DNA, 780 bp, Homo sapiens
gaagttttcttttgtgtgtgggtctctgccaggatttggtgtcaagatgatgctggccttatagaaggagttagggaagagtccctcctcctccattttatagaatagtttcagtaggaatggtaccagctcttctttgtacatctagtagaattcggctgtgtttccatcaggtcctgggctttttttggttggtaggctatttattaccgagttaattttgtagctccttgttgacctgttcaggtaatcaatttctttctgggtcagtcttgggagggtgtatgtgtccaagaatttacccatctcttctagattttctagtttgtgtgcctagagatgtttgtagtagtttctgatggttctttttggttctttttatttctgtggggccaataataacattaccttatcacttatagttgtgtttatttggatattctctcttttcttccttatttgtctaggtataatagcctatctatcttattatttttttcaaaaaaccaattcctgtattcattgatcttttgaattttttgcgtgtcttgatttccttcatttaacttctgatattagttatttcttatcttctgctagctttggggtttatctgtttttgcttctctaattttttcagttgtgagattaggttgttaatttaagatttttctaaattttgatgtggccatttagtgctatgaatttccctcttaacactkccttagctgtgtctcagagattctggtatattgtatgtatgggggtctaacctcccac

SEQ ID NO: 956467 - DNA, 780 bp, Homo sapiens
gaagttttcttttgtgtgtgggtctctgccaggatttggtgtcaagatgatgctggccttatagaaggagttagggaagagtccctcctcctccattttatagaatagtttcagtaggaatggtaccagctcttctttgtacatctagtagaattcggctgtgtttccatcaggtcctgggctttttttggttggtaggctatttattaccgagttaattttgtagctccttgttgacctgttcaggtaatcaatttctttctgggtcagtcttgggagggtgtatgtgtccaagaatttacccatctcttctagattttctagtttgtgtgcctagagatgtttgtagtagtttctgatggttctttttggttctttttatttctgtggggccaataataacattaccttatcacttatagttgtgtttatttggatattctctcttttcttccttatttgtctaggtataatagcctatctatcttattatttttttcaaaaaaccaattcctgtattcattgatcttttgaattttttgcgtgtcttgatttccttcatttaacttctgatattagttatttcttatcttctgctagctttggggtttatctgtttttgcttctctaattttttcagttgtgagattaggttgttaatttaagatttttctaaattttgatgtggccatttagtgctatgaatttccctcttaacacttccttagctgtgtctcrgagattctggtatattgtatgtatgggggtctaacctcccac

SEQ ID NO: 956468 - DNA, 680 bp, Homo sapiens
ctctcctcccaggttctggatctcagctttaacttgactgcagattttcagttggtgggagtagaacttaatctgttccaggtaggccaacaagtcctgtttacaagatggatctgggcactaaatatgmatcaaagataaaaatagatacagcagaataaataatagttagatcaaggtgagtaaatacagtattcacatggcaggtaccttataaagcagcaattttattttcatacaggaccaagtagcttctgatatgcttctaccatttacaatagttcattcattttgcaaccttagttacttcagcttagccaaaaggaacgttaaaataattatttttttgagatggagtctcgctctgttgcccaggctggagtgcagtggcaagatcttggctcactgcaacctctgcctcccgggttcaagtgattctcctgtctcagcctcccgggtagctgtgactacaggcatgcgccaccacacctggctaattttttgtatttttagtagagacagggtttcaccgtgttatctaggatggtcttgatctcctgacctcatgatctgcctgccttggcatcccacagtgctgggattacaggcgtgagccaccacacctggccaagaaacgttaaaataatttttagacataaaaaggtatataaaatagctgc

SEQ ID NO: 956469 - DNA, 578 bp, Homo sapiens
tttttttttttttttttagcttgcttggagaatacttctgagactttccaaggtgaagtttataaatctatccatagtttaaatmttgaggcatggatatagttcctatctgttagaagtgtatcttgaccttgtaaatccatggagtaaaccctatactgtggccacatgatgaagagaaataagatgagaagccatatctatctcacactcaaaagaccaggcttttttctctataccatgctgccttaaattattaatacacaaggtagcaaaattccagccattcttcccatcccttatggaatcccatgtccactctcctggttattgtcattgtcatcttcctcttcatcctctttatgaactgtctaaagattgatgcttcctagctgggaatagttcatagagagtatattacattactgttctactcagcaattttacaatctgaaacagacaatagtgaagtggacctaaataagaagaatgtatagagaatagtggccgggcgcagttgctcacgattgtaatcccagccctatgggaggcggagggaggcagatcacaaggtcatg

SEQ ID NO: 956470 - DNA, 456 bp, Homo sapiens
tgttggaggcagggcctggtgggaggtgattgggtcatgaatacagatccctcatgcatggtttaacaccatccccatggtgataagagagctctcactcaattatttcacacgagatcaggttgtttaaaagcctgggacctccccgaccccagtctcttgctcccactctcatcatgtgatgtgcctgctcccccttcactttctgccatgattggaagcttccagaggccctcaccagaagcaaatgttggacccacactttctgtgcagcctgcagaactgtgagccaaagtaaaccacttttccttataaattacccagtctcgggtatttctttatagcaatgcaagaatgagttaattaaaaaattggtactgaggagtagggtgctgttataaagatactagaaaatgtggaagtcrctttggaactgggaaatgagcagaggttggc

SEQ ID NO: 956471 - DNA, 750 bp, Homo sapiens
gacatggagtcaaaggagttgattttggagctttaagattagtgactgccctgttgggtttcagacgtatagggggcctgttgcccctttcttttggctaatttttctcttttggaattagattgtacaccattgtatcctggaattaaataattttgttttttaatctcacaggctattggatggaaggcattcatctccagttgagactaacgacttgggactttggagttaatgctggaatgagttaatacgttgggggaactattgaaaaggcatgattgtattttgaaatggcgagaaggacatgagatttgggaggtaggtggatgaaatgatacgattgggatgtctgtcccctccaaatctcatgttgcaatgtgcgtccttgtgttggaggtgaggtctggtgggaggtgactggatcatgagggtggattcctcatgaataatttagcaccatctccttggtgaaaagtgagctcttactcagttcacaagagatctggttgtttaaaagtctgggacctcccctcttttgctttcttgctcctgctctcacagcatcatgtgcctcctccccctttgccttctgttatgattggaagcttcctgagggccttacgagaagcagttgctggcaccatgcttcctgtacagcctgyagaattgcgagtcaaaataaatcactttcttcataaattacccagccttgagtatttcttcatgacaatgcaagaacaagctaat

SEQ ID NO: 956472 - DNA, 637 bp, Homo sapiens
caacggttagaaaagcctgcctgggggccaggtaaaggatgaaggagatgagaaatttgtgcaacatccttttttttttttttttttttgcctggctgggcccccaaaatggtatttktttttctctttttaagcaacttggtgtttgtacattcaattcagcacactcatgtggatgaattaagggggatgggaataaaccagtgtctcccaagttcgccataagactcaccctgggtgtttgttaagtgcacatcttggagtccatcctgggcattctgattcaatggtctgaaacgggaccctggagtctgcaggtttaacaaattgcccatgtgatttttaatcaggcaaatttatgaacccctgtgctgtttccccagcgtatccagagcctgccagaacatggagattaattgcaaggatattcacgataacatctagatcaggagctacggcacggggaggccctcatgaggctcgggctgggagactgggtgaggcggggaggtcaggatccagtggagctctcagggcatggctttctgaggtcttacagcagccagagtttgtggctcttccttccagactctgccaccagccggactcatctgctgtcagggagtctccgttcact

SEQ ID NO: 956473 - DNA, 632 bp, Homo sapiens
tgtcagccatcagggccttcaaccactttctgagggaagagggagagagaaagctggggcctcagaggacaatggggagggtgctgggagggaagcrggggcaaaaggaaagagatggaactgccaaagtgccatctgcaaggtgaagggagcatgggagggcttaggccagcaggagtgaaggggaaggacgatgccacagaagacacacaggacagcctagtgccaccacctctaggtgcgcctcttgaagcacagaataggatctgagtcctgttgttgaagcttggccttaccgctttccaactgtgagaactcaggcaagctgtgtaatctttataggcctcggttttcacacctgtgaagtcggagggataatgccacttacctccacaggaggcttttgctggttaaaggagaaaagtcctggcacatactagatgctcagtaatcaacactgccttccttccctctcctagtgttgaaggagagcccagcgacttttaaaccttcccatgttatattacttcctatacaggaaaaattgccaagagctgaacagacacaaggtgcatccctagctgtcaccccaaatgctcctcccccgacagggtaggactcatcccagaggt

SEQ ID NO: 956474 - DNA, 585 bp, Homo sapiens
caagccccctgctctgacattgcacaattatgtgcatttcagtaaggacttttactttttttttttttttaatastattccacactggctactctcagaggcaagatcctgggctggatgggccattggtccggttccactggggcagttcttgtgccttgatggtcttaaacaaccttgctgagagataaatgtgattccaagaggattttgagataaattcccacagctatgaagataaaaacatttgactccagttttgatgtaagcagcagccccaaatatttaaagtcatttgcttcatttattttctcaactggatcagcacattctaaaggatatgacctgcttgccctaaagtaatttttttgtttggtctcagagaatctttaccaaggtcctgcaagaaaattcctctgtagaagtggccatagttaaattttcttcttttgtatttttattttacccatgaatctgctccctcctccaaattgtactgtgtgtttaagttcaaatatccctctgaacacatgattctcaggacgtgctgattaatgtgaaaactagcatggaaaaactagcttt

SEQ ID NO: 956475 - DNA, 566 bp, Homo sapiens
ataatagcatcaaaaagaataaaatagaaataaacataaccaaggaagtgacagacttgtatactgaaaactacacaatgttgatgagagaaattgaagatgacacaaataaatgaaaagctatcccatattcatggattggaagacaatattgcttaaatgttcatagtactcaaagtgacctacagattcaaaggaacccctataaaaattccaatggcattttctttacagaaatggaaaaaaaaatcctagaattcttatgtaaccacaaaagatctcaaatagccaaagaaatcttgagaaagaacaaagttggaggcatcacactttctgatttcaaaatatattacaaagcaacagtaattaaaacagtatggtactggtataaaaaagatctatagaccaatagaacagagaacctggaaataaaggtatgcatatacagtcaactgatctttaacaagggtgccaacaaaacacagtgggraaaggtcaatctcttcaacaaatgatgtcgagaaaactgcatatacccacacaaaagaatgacattggaccattac

SEQ ID NO: 956476 - DNA, 638 bp, Homo sapiens
attttaaaatattagtaaaaatggaaataacaatagcattttatgacataaaaattatatgaaattcmaatttcagtattcataattgaatgtgtactagaaactgacaatcaagaaagaaaattttgggggtgttgaatgcagtactcagaaatatcttatctgaagagtagggaaaaaccaaacttaaaccaaaaggtattctggttcttcctttaaaaaaaagattgggaaagaacaaaatatttctgagtaacaaccccattgcataaaaaagttcaagtatatttatagaaatacaaaattagcaagcactccacaagataaaattcaacatgacataaatgggtgacagatataaaaaatgatatgggtgacagatataaacaagtttcaaaaaaatttataaagatgaaacaacaacaatgtctttgatcaaatatacattggatagaattaaaggcagattagactttgcagaagaaaaaatatgatctggaaaaatacagcaatagaaataatccagaataaagcacaaaaaagaattaaaaatgcaaaacatttaaaccattatgttaatgggaataaatgataccaaatgtatacaaaattttccagaaaatttaggaagagattag

SEQ ID NO: 956477 - DNA, 769 bp, Homo sapiens
gctgatttgactaataaaggctggtctgttatcagactgtatagaggtgggaaggctaaactgaggaattatgtctgacagaagggaagaaatgactgcggtggccttctcagaccctgtaggaaaggcctctacctatccagtgaaagtgtctacctagactaagaggtattttagttatctgactcggggcatgttgagtaaagctaatttgccagtcctgggtggggcaaatcctcgagcttgatgtgtagggaaaggagggggcctgaataatccttgagaagtagtagaatagcagatggaacactgagaagttatttccttgaagatagatttccacgatggaaaggaaacgagaggttttaaggggcgggctagtggcttgtactatagcatagcctgcctttgctggtgtgtggcgattaggcctggtggaactgccatcaataaactaagtgtgatcagggtgaggaacaggaaagaaggaaatatggggaaatggggtgaacgtcaggtggatcagagagatgcagtcatgagggtcaggtgtggtatccggaataacgtgggaggccggaatgaagtccgtgccaggaacaatggtagttgtgggagactcaacaaagagtgagtatagctgaaggagctgggaagcagaaagtatatgtatcaggtatgaggaagaaaatagattttcgaagttatggaactgtagagtgagttgarcatagtttgtgatttttaggtcctctaaaagtattaaagc

SEQ ID NO: 956478 - DNA, 665 bp, Homo sapiens
ctggatgatgggacttgcagccaggatcagcttggcatcatggaactggtctgtgtgtgccattgctgggkgccccagcctgctaccctaagattgtggcacacgtggggtcctctctgcttcacacctaggcatatctccaggtatccgggtcaccccctgacctggatcagcagcatgagcttcctcactcttcctgtgcatagatcatggtacagtgaggctgtctccacttcatgctgaggcagattctagacatttggagcacccactcacctggatcagtagcctaaactgccccacccttcctttgcagagatcctggtacaagaggaccctctctgctttatacccagggagagccccaggcattcagaacacctgcttgcctggttcagcagccaaagtcaccccacccatactgtgcagagatcttggaacaggggagccctttccactccatgcccaggcagatctccaggcatttggagcactggtcacctaaaacagcagcctgagcaggccacgttttatttgcagagatcccggtgtggggctgggggaggaagccctctccactccatgcacagcagattttcaagcacttagagtacctactttcctggatcagaagtttaggctgtcctcgattcctgtgcagagaa

SEQ ID NO: 956479 - DNA, 750 bp, Homo sapiens
ggacagctctgctgggtgagaagaaagctcaggctggcggggatggcaaaggagctgctctcggacccccaatcctgtgtatgggtgggtgtatgttgggcagggagtgtggagtggggagggcccctgacagaagaggaaagcaaagaaacgtggttaaacagggaagcactgagggtcagaccaaagtaatgagaggcgtctggtgttgtggctaaattatgtccccccagttcctccactgaagtcctaacccctggtacctcagaatgggattgtgttggagatgggtttgttttgtttttgtttttttgagacagggcctcactctgtcccccaggccggagtgcagtgacatgatacggccctccccagcctctacctcctgggctcaagagatcctcctgccgcggacttcctggtagctgggatgaggggtaggtaccaccatgcctggctaatttttgtatttttttgtagatatggggtttcaccatgtcgcccaggctcgtctcaagctcctggcctcagcctcccaaagcaatggggttacaggcatgagtcactgtgcctggcccagagatggggtttttaaagagaggtagtgaagttaaagtgaggccatatcggtgggccctgatccaacatgacagatgtccttaaaagaagaggagattagggcacagataagacacagaccaggggcaaccrtgcgaggccgcggcaggaaggtggccgtctgcaagcccc

SEQ ID NO: 956480 - DNA, 750 bp, Homo sapiens
ggacagctctgctgggtgagaagaaagctcaggctggcggggatggcaaaggagctgctctcggacccccaatcctgtgtatgggtgggtgtatgttgggcagggagtgtggagtggggagggcccctgacagaagaggaaagcaaagaaacgtggttaaacagggaagcactgagggtcagaccaaagtaatgagaggcgtctggtgttgtggctaaattatgtccccccagttcctccactgaagtcctaacccctggtacctcagaatgggattgtgttggagatgggtttgttttgtttttgtttttttgagacagggcctcactctgtcccccaggccggagtgcagtgacatgatacggccctccccagcctctacctcctgggctcaagagatcctcctgccgcggacttcctggtagctgggatgaggggtaggtaccaccatgcctggctaatttttgtatttttttgtagatatggggtttcaccatgtcgcccaggctcgtctcaagctcctggcctcagcctcccaaagcaatggggttacaggcatgagtcactgtgcctggcccagagatggggtttttaaagagaggtagtgaagttaaagtgaggccatatcggtgggccctgatccaacatgacagatgtccttaaaagaagaggagattagggcacagataagacacagaccaggggcaaccgtgcraggccgcggcaggaaggtggccgtctgcaagcccc

SEQ ID NO: 956481 - DNA, 569 bp, Homo sapiens
tatacctcagtacaaataaatttatcagattctttcatcagactgctggcaccatggctaaaaatggggttgctgataaggtgaaaagaggggaggaagagtgaattagataaaggctggggcatcccaacttattctacttggaatttgctaaagactaaagactaacctttatcacagtttagaagcacagaaattcacaagtgagaaatggtgcccaagacctgagatcctgagattctatagcgctgcaagacagacaagtttgatggttttgataatcaagactaagacaccccaccctttttcccctgccttggcttgtagtcatatgagagtttctggtctagaaccaatcagattgcagtaagagcctgatgacatggcaggatgtcacctgcccctatggcactctgacaaaacagctacagtcactgatcctcaataaggatgttgagagtcagatttcacctttttctagagaggctctcactctrttgcccaggctgagtgcagtggcatgatcacagctcactgcagcctcagcctctcaggctcaagtgaccctc

SEQ ID NO: 956482 - DNA, 627 bp, Homo sapiens
ttaaaataatttttattttagaaaatgccaaagatatggaatggctgctgggttgggatcaaaatctttttttttttttttatgttgagggtattatagcatgtgcatttgctaatgggaataatctaatctagagagaggtacaaactagttaaacaggagaggagtatatttgaggaggccatgtcctggagcggattagaggaaattagatagagcatacaaatgggaagtttggtgttaagaacgtggagtaattctctataaaaacagacagaataacatatgggtatccattagacacatagatatgatggaaccagtggatggcagttgtcttataattacatatcttttgtaagtgaaatagaaaaacccccgcaatctcaacagataaggcagagctgaataagatatgaaaattttgaagatagctaatgtatgggattattcagtagaatgtttgtgatttaatcagggaaaaatattaatttccctatggtagagttggcttggctacattaaagcccatatgaggttcagagtcaagaaactgaagtgagaccagatagcaatgggtgtgtttwctcaaagcctgatcaagagtgtaggtgcagacatggagca

SEQ ID NO: 956483 - DNA, 787 bp, Homo sapiens
cctcacttaggtcctttagcacacactgtattctttttttagataatagctttgttgatatataattcacatgccataaaattaacactataaawgtatacaattcgttttttagtaccttcacagagttgtacaaccatcaccatcatctaattttagaagatttccatcatcccaaaatgaagcaccatacccattccctcccactcctaggccctgacaatgactcatccactttgtctctatgagtttgcctattctgggtgacatggtaattgtgtgtgtagtattttgaggaactgccaaactgctcctcaaagtggctgcaccactttacattcctgccagcaactaatgagggttccaatgtctccacatcctcaccaacacttgttactgtctgccctttgtattgcagccatcctactgggtgtgaagtagtatctctggttttaactggcattcctctactgactaatgacgttgagcaacttttcacatgcttattggccatttgtatatcttctttgggtaaatgtctactcagatcctttacctacctttttcctaggtttagttgttgagttataaaagttactattttggtgcccgagttgaaaatcaatgtgttataaatttaaaggtttatttctggactctcaattacactgatctatgcacctatctttatgtcagtaccatactgtcttgatcatgcagtttgtaataagtttgggaatgggaaagtgtgagttctccaactttgatctacttttttctatgacgt

SEQ ID NO: 956484 - DNA, 542 bp, Homo sapiens
gatgtaaggcaatttaaatataagggggaaagtgttcctgaataatcrataatttagaaactatttcgcgtacatagaaatgctattgagtaaagctcctagttactgtctcccaaggacttctgtttgcttctccctcgttgtgcaatatttgccagtatgctttcctcacatttttgtcctcaaaaattccccatatttcattttcctttttagctctactactcagtgaggcttaaacatactgttttcgttacagtgtttatgtatccttggggctcatgccttttactgctagcatggaagtcgcctgactcccctgtatagtggtttctggctgcatgatccaggggcagttctggtgcacctgcaggcctttcacacctcatgcctgttgcaagtgtattcattcagttttgtatagtagcacatgatatgatagtggcgtcttaaccactactttattctgtctgtacacaataaaattattagtagcacagtgatacaaataacataatttatatcatcaaagtctaggcatc

SEQ ID NO: 956485 - DNA, 599 bp, Homo sapiens
gccatcaaaaccttagaaaacacttcgttgggrgcatctgtccagcaaccgcctgaccaaccttggactgatgccatccttgctattgattcttgtagccaaagataacggattcaaggcaacttacataatcctccttgttttgccttcaaaaacttccccttgcctgaacctctttgaatacacatgtaatttactaagacacatgtattcccattgcaatgctactcctgaataaatatttttatttagagaattttcctctctgtttgttatttagtctgacatcatagtgtccagaagcaggatagagtgagctcgcctcacatggatcaatggcccctggaactgagtgtggtcccagcagagccctttgcactatctacttccaggagttgccttttctaccctgatgaatctcctctctgattcttgcactccctccttttgatgagttcttttgactttatttgggatcttctcttttggtataagactgccttaaatgaaggaccctgcatccctcttgagactataaagtcttttttggcaagccctttctgatataaagacaagtgtccttttggagagtactctag

SEQ ID NO: 956486 - DNA, 599 bp, Homo sapiens
gccatcaaaaccttagaaaacacttcgttgggggcatctgtccagcaaccgcctgaccaaccttggactgatgccatccttgctattgattcttgtagccaaagataacggattcaaggcaacttayataatcctccttgttttgccttcaaaaacttccccttgcctgaacctctttgaatacacatgtaatttactaagacacatgtattcccattgcaatgctactcctgaataaatatttttatttagagaattttcctctctgtttgttatttagtctgacatcatagtgtccagaagcaggatagagtgagctcgcctcacatggatcaatggcccctggaactgagtgtggtcccagcagagccctttgcactatctacttccaggagttgccttttctaccctgatgaatctcctctctgattcttgcactccctccttttgatgagttcttttgactttatttgggatcttctcttttggtataagactgccttaaatgaaggaccctgcatccctcttgagactataaagtcttttttggcaagccctttctgatataaagacaagtgtccttttggagagtactctag

SEQ ID NO: 956487 - DNA, 675 bp, Homo sapiens
agctgtctgtatttttgagctcatgaataggatccatcctgaaaccatggtccctttgttgctgggttcccaagcaagcacaatgatggttggggaggttggtgattgacagtcmtaggtagcagggccttaatacaaatgatcgggacccttctccgcagtaaagacttattggtgagcatttgcgtggaccacaggtattcgcacacccagcgctcattcctaagggtcttctttctgaatttattgacgccaatcatccaactgtgcttcttccaagaccctggctgcccagtcaaaccaatagtcactgcctatgttctggtctagctatttcttcccctaggcaaagtagacaatgagagaacccttgaagttatgtctactaaaaatatttaccttctccaccatctttcagaatcatctctggtttgttttgggaaatgtttaacaacaggctctctggaaaaatagaagctgtaatttgtagtatttgccaatttctgtggtataaatattcccacagtcaccagtctcaagctactggcttgacgtcactgactgcagagttgggaagagaggtgccattgtcttccattagatagcatttccaccaggcatatacaatagatgtcagtgacctcaagaacagagataatagtgaaatacataaag

SEQ ID NO: 956488 - DNA, 675 bp, Homo sapiens
agctgtctgtatttttgagctcatgaataggatccatcctgaaaccatggtccctttgttgctgggttcccaagcaagcacaatgatggttggggaggttggtgattgacagtcataggtagmagggccttaatacaaatgatcgggacccttctccgcagtaaagacttattggtgagcatttgcgtggaccacaggtattcgcacacccagcgctcattcctaagggtcttctttctgaatttattgacgccaatcatccaactgtgcttcttccaagaccctggctgcccagtcaaaccaatagtcactgcctatgttctggtctagctatttcttcccctaggcaaagtagacaatgagagaacccttgaagttatgtctactaaaaatatttaccttctccaccatctttcagaatcatctctggtttgttttgggaaatgtttaacaacaggctctctggaaaaatagaagctgtaatttgtagtatttgccaatttctgtggtataaatattcccacagtcaccagtctcaagctactggcttgacgtcactgactgcagagttgggaagagaggtgccattgtcttccattagatagcatttccaccaggcatatacaatagatgtcagtgacctcaagaacagagataatagtgaaatacataaag

SEQ ID NO: 956489 - DNA, 587 bp, Homo sapiens
gccaacatgatgaaaccctgtctctactaaaaatacaaaaagttagctgggtgtggtggtgtgcacctgcaatctcagctactcaggaggctgagacaagagaatcgcttgaacccgggagggggaggctgcagtgagctgagatcgcgccacggcactctagcctgggcaacaagagaaaaactccatcaaaaaaaaaaaaaaaagaagaagaagaatcactttttcttcccagtaggcttctttccttctttggagatgagcaaaaagtataaaaacatctgtggaaacctcctgtttgtatgttttacattggaatgggtgcaaaaaatacactcactattcctttacatccttctaagagggctgtttctactcttgacactcaatacttgtttttgtttctctaatcactgttatacgttactcacgaatattcatcaaaacccttttccttattttttatctagttttaaataattcatttgagataaaaagaagtttttctttgctttttttaatcactcagyggaggatgaacatgaagctgtaccaatggataggagaccgtctggtagagcacggga

SEQ ID NO: 956490 - DNA, 550 bp, Homo sapiens
tctttgaaagtgtgcagagtcattcatatccaaaccatcaaggcctgcccaacagcctggtgacttgaaatcttgacgtgtacacagagtctaaacctcggtctttagattgcctccttactggacctctttacttattaagattcatccttgtggaggaagtgaggtcatggatgttcacatctatctttcccaggaagaaaaggaagcttcaagagctgggaaatgctatgcaccactgtgcaggttctgagcagcacagagccacctgtggggtgggcgggtaggtgagtagtggacatctgaccaccaggcgctgtgcaggactacctccttgcagagcaggtggggccttccaagttgcctactcatccaacctgcacagtaagccttatgggagcgtcatggggctacgcctacttcaaagagcaacttarctaaagggaaagagaatttgcacttgctctcttccactctagcagacttgcacttgtcgctatttatttgtgaacacagactcattttagattgacttaaaaataaaaaaaag

SEQ ID NO: 956491 - DNA, 774 bp, Homo sapiens
attatcctaggtcctgaaaagtggaagagggagacagcagaagagagggamccagggagatagtagcataagaaggacttagcccaacgttgctggttttttttttttttttttttttttttttttttttttttgacagacagggtcttgctgtggcccaggctagagtttggtggtgcaattagggctcacggcagccccttgacctcccaggctcaagtgatactcctgcctcagccttctgagtagctgggaccacaggtgtgcaccaccatagtcagctagttttgttatgtattatttatttatttatttctatatttattgcagagatgaggtattactctgttgcccaggctggtctcagactcctcagtgcaagtgaatcctcctcccttggcctccccaaatgctgggattacagaggtgagacatcatgcctggccatggttgctggttttgaagatgtgggaaggggaccatgagccaaggagtgcaggtggcctgtagaatctgggaaaggaaaggaagtggattcccccagagcttccagaaaggaacacagccctgatgacaccttggctttagcccagtgagactcctgttggacttctgacctctaggatcttaagtcaatgcatttgtgatattagtccaatcaattttcagtaatttgttacggcagcaaaggtaaacaaaacaggagtaggcagattcccgttcaattcaatttatacacactgaacacctgctatgtgccagatcctgtgctaa

SEQ ID NO: 956492 - DNA, 755 bp, Homo sapiens
ctgacgcttgacagagacacaggaaaggaatatgcaattctccaattctctattttttttttttgttttaggtagattctcamcctgtcacccagtctagagtgcaatggtgtgatcttggctgactgcaatctctgcctcctacattcaagtgatcctcccacctcagcctcccaagtagctgggacaacaagtgtgcaccaccatgcctggttaatttttgtatttttaggagagaggaggtttcacgtgttggccagggtggtcttgaattcctgacctcaggtgagccacctgcctcagcctcccaaagagctaggattacaggtgtgagccaccatggccggccaggaatatccagttctttaatagtgtttcttttttaaaacattggcattcagattaaatatctgtatgccattgtttaatacaccgcaaaaacaagtcaggtgagagatgaaacctagagagaactagacaacaagttacccagacttgtaagctctgtgcatgattaggtagcttcaaatacaaagctttgaagatgtgcaggggtttcagaggtggagggactcaggcccttctggtagggccacgtgtttgcattgtcttattggactgttacaggagctgtctcttcaaaggcacttgctcctagcaaacttatgcctttccaaagtctcctctaaaaatgagtagaggacactttgttttacttttactgaagtgaaaacaccaaggcatgctttaggggt

SEQ ID NO: 956493 - DNA, 634 bp, Homo sapiens; identical to SEQ ID NO: 956073

SEQ ID NO: 956494 - DNA, 571 bp, Homo sapiens
gatgtttgttgtactcattgtttaaaataggggaaaacaggagacagcccaagtggctagtgtctgggagccatcatgtttttgcctcaacaattgcaacacttcagtctttttggggtagtagtgaggaagccacttctgccactctgtcttccctatattcttttttattttttgagatggagtttcactcttgttgcccaggctggagtgcaatggagcaatctcggctcactgcaacctccacctcccgggttcaagcgattgtcctgcctcagcctcctgagtagctgggattataggcgcccacctccacgcccggctaattttgtgtttttagtagagacagggtttctccatgttggtcaggctggtctcaaacttccgacctcaggtgatccacctgcctcagcctcccaaattgctgagattacaggtgtgagccaccgcgcccarccccccatattctttatacccctgggaagagctgtgacttagccgatgggtgaaaacgagccaagagtgactgcatggagttgtctgctatccacctggccctgccacctcctga

SEQ ID NO: 956495 - DNA, 473 bp, Homo sapiens; identical to SEQ ID NO: 956070

SEQ ID NO: 956496 - DNA, 592 bp, Homo sapiens
aaggagcaacgccgggaacacaacactcgtcagctctcagttcctgccctaggtgtggtcccctgcatgcagagggacagaatgggtgcttgagggaaccctaagcacccaccttggtgtgactccttcatgaggcccaccaccaaacagggaccctgcatgcttgaaggccagcagcaggcaccactctgacctcatgccctcagcacctccaaaagccctccaccctcttaagaagggcctagcctcatgaccctggtctgcctttgggccagatctccctgtgcaggggtggccaaggtccccacttgcccacacctcagaatttgcagcctaggatgcagccactcttttgtaaactgcaccctaaatcacacagcatttgtgtaaccacccattcaccccaaacttccagcttccttttacaaattactcttaaaacagtctgactttgggaggccgaggtgcgcggatcacgaggtcaagagatcaagaccatcctagcaaacatggtgaaaccccgtctctactaaaaatacaaaaattaggcatgktggcacatgcctgtagtcccagcaacttgggaggctga

SEQ ID NO: 956497 - DNA, 626 bp, Homo sapiens
cactggcatgatctcaattcactgcaacctccacctcccgggttcaggcgattctcctgcctcagcctccagagtagctgggactacartcacgtgccaccatgcccagctaatgtttgcatttttagtagagacggggtttcaccatgttggccaggatggtctcgatctcttgacctcatgatctgcccgcctcggcctcccaaagtgctgatattacaggcgtgagccaccgcacccagccagggttcatttctatttacatgagagccaaaaactagaggtccaagctgggataacaaagccactcccgctgcttagagtaccccactgataataggagttaagaagaaatcacttaggcagatagtaaggatatgggagtcctcggtaaggcttttctttttaatgaaaagcagcccaaaatcattttctaccaaacagcaacctataaagtcaagctgcagatacagacaaacaagctgggagcttgcatggctgaatgtcagcaggaactagggactagggagggactagacatgttcaagatgggggctccatcatcccttctttgccagccacgtgtacagtaaggagcagacaagatggcaccagccaaggagagt

SEQ ID NO: 956498 - DNA, 636 bp, Homo sapiens
ttaatcagcaattctaccttcagtaaattaaagcctktatcttacccggtgtacatgaagttccttaaagatctaatgcttccatgtacattttctatggttttacaggattattattgccaatttaggtcagatacatcacagaaggaataaattattattttgatagaggttattagcagcatgtatacaaattagtttagataaatcatgcattgtcctacaaactagttatttctggcttaatgtaatatagctcctgaattttttccagcagcataataaaatggctaatcaggtgaatggtaatgcggtacagttaaaagaagaggaagaaccaatggatacttccagtgtaactcacacagaacactacaagacactgatagaggcaggcctcccacagaaggtggcagaaagacttgatgaaatatttcagacaggtataatatgcatttcttgtttctgactggttatgaaagtgagggcaaaccactttgaattttatagttttttaaggttaaataatacttattgtttctgatctgtagagctgaatgtttgttactttcccttcattgaaggcatattgggtttgactttgatactcttatttcattattttgaagccttctt

SEQ ID NO: 956499 - DNA, 636 bp, Homo sapiens
ttaatcagcaattctaccttcagtaaattaaagcctttatcttaccyggtgtacatgaagttccttaaagatctaatgcttccatgtacattttctatggttttacaggattattattgccaatttaggtcagatacatcacagaaggaataaattattattttgatagaggttattagcagcatgtatacaaattagtttagataaatcatgcattgtcctacaaactagttatttctggcttaatgtaatatagctcctgaattttttccagcagcataataaaatggctaatcaggtgaatggtaatgcggtacagttaaaagaagaggaagaaccaatggatacttccagtgtaactcacacagaacactacaagacactgatagaggcaggcctcccacagaaggtggcagaaagacttgatgaaatatttcagacaggtataatatgcatttcttgtttctgactggttatgaaagtgagggcaaaccactttgaattttatagttttttaaggttaaataatacttattgtttctgatctgtagagctgaatgtttgttactttcccttcattgaaggcatattgggtttgactttgatactcttatttcattattttgaagccttctt

SEQ ID NO: 956500 - DNA, 653 bp, Homo sapiens
acctaggctgaaactgaagtttacagacttaaaggattcctaactgaagtasagaataatctcccaagaacacgcgtacaggaatgtttccaaattctattaaacagtattgagatctgcaataacgcagtatttttgtaactaaggaaatattaccccttaacatacttaaaaactgagctccttttctcaccaccgttaccatacttgaccatactgattctcacctttaccccatgggaaagaatcttaaaatgatcaaactccttgttattttaaaaggcatgactaaactgtgtctaatttaatctcttgcctcttttttttttggagacagggtctcactctgtcacccaggctagagtgcagtggcaggatcacagctcactacagcatctacctcccaggcccaaacaatactcccacctcagcctccacggtggctgggactacaggtgtgtgccaccatgctcagctaagtttctgattttttgtagagatggggtctccctatgttgcccaggctgatcttgaactccggggctcaagcaatcctcccacctgggcctcccaaagtgctaggattaccagcaagaaccaccaccacacagagcccctcctgcctcttaacaaatagacatctaggcctaaaa

SEQ ID NO: 956501 - DNA, 502 bp, Homo sapiens
ggggcggagctcgccctgtggctgctcggtggtgggtgaggtatcagctttctccgctagttcccaaccctggtagtccttagtcccctggaatgcgtgagggagatgcttagggagttctcgaagtggggcgtagaggcatcgcctggtcaaggcctcctatcgttaccgatctatatttcatgtgagcacgttggaccctaccgggttgtcatcaagcaagccgagtttgcacttagggtaggcaccttctcggagagacagggctcatcgttacgggggtggggcctgttctaaggttaggccgaggtgggcggagctaatgggagagctttgggtgtgacctaggagaaagaagggcagtaacttaagcgattgttttggagtggcaartgatagttaagggctgataaggttgctggggaggttacctgtcttaactcactgcccttttttctcagggagccactggtggggaccttttttgggccccctttccttc

SEQ ID NO: 956502 - DNA, 575 bp, Homo sapiens
tccaaagtcttatctagagatgggttccttccacctatgaggctgtgatatcaaaagcaaattatttactttcaagatrcaatggtagtataggcattgaggatacagtcccatcccaaaagggagaaatcagccaaagaaaggggtaataggcctcaaacaagtctgaaacccagttgggcagtcatttaatcttaaaattctaaaataatctttgactctatatcccacatcctgggcacaattgtgaaaggggtgggctctcaaagctttgggcagctctgtctctgtggctttgcagggtgcagcccatgtggctgttctcatgggttggaattgagtgcttgtggcttttccagacagaggatgcaagctgccaatgaatcaaccattctcaggtctggagggtggtggcctccttcccaccactccactaggcagtcccttggtaggcactctgcatgaagtctccaaccccacgtttctcctttgcaccaccctagtagagtttctctggtgggggctccacctctgcagaaggcttctgcctgggcacccaggcttttccacccatc

SEQ ID NO: 956503 - DNA, 575 bp, Homo sapiens
tccaaagtcttatctagagatgggttccttccacctatgaggctgtgatatcaaaagcaaattatttactttcaagatgcaatggtagtataggcattgaggatacagtcccatcccaaaagggagaaatcagccaaagaaaggggtaataggcctcaaacaagtctgaaacccagttgggcagtcatttaatcttaaaattctaaaataatctttgactctatatcccacatcctgggcacaattgtgaaaggggtgggctctcaaagctttgggcagctctgtctctgtggctttgcagggtgcagcccatgtggctgttctcatgggttggaattgagtgcttgtggcttttccagacagaggatgcaagctgccaatgaatcaaccattctcaggtctggagggtggtggcctccttcccaccactccactaggcagtcccttggtaggcactctgcatgaagtctccaaccccacgtttctcctttgcaccaccctagtagagtttctctggtggrggctccacctctgcagaaggcttctgcctgggcacccaggcttttccacccatc

SEQ ID NO: 956504 - DNA, 441 bp, Homo sapiens
agggcagagagagctgagcaatgatttttttttttttttttgagacagagtcttgctctgttgcccaggctggagtgcattggcgctatcttggctcactgcaamctccacctcccaggtccacgccattctcctgcctcagcctcctgagtagctgggactacaggtgaccaccaccacgcctggctaattttttgtatttttagtagagacagggtttcaccgtgttagccaggatggtctcaatctcctgacctcgtgatccacccgcctcggcctcccaaagtgctgggattacaggagtgagacaccgcgcctggcctaagcaatgattttaagttgggttccatgatgtagcagccaaaattagccctgataaaagctcctttatagccaactgaaatctacatctcagagaaactatccatacaacttcccaat

SEQ ID NO: 956505 - DNA, 441 bp, Homo sapiens
ttaactgccaagtttctgttttggtgacwactcttcttctagctgctgttttggtcttcaggggaatggagaggaggaagctgaagccaggctgatggccagactgtgtttaaaaaatatatttaggaaatgtgttttttggtatttgaagtaattacctaacccaggttcttgagaagcttgaacaaaatttgcattgtggatcaatgactttgctattatatttgtgttttctgagatggcaggatgaaatggtttctgagaccagtctataaacaggtccacggtgagagaagaagctgcacaggatcctttcgaacaggttacacttacagaatcttatttaatccttgagaaattggatcaagcagtataacgagcaattggcagagaaatcaagctcagaaaggccattttggccgggtgcggtggctcacgtct

SEQ ID NO: 956506 - DNA, 621 bp, Homo sapiens
acactacacttttccaacggtcttagcaaatggcacaccaggagattatgccccgcgcctggctcagcgggtcccacgcccacagagccttgctcactactagtgcagcagtccaagatcaaactgcgaggcagcagcctggctggggaaggggcgtccgccattgctgaagcttgagtaggtaaacaaagcggctgggaagctcgaactgggtggagcccaccacagctcaaggaggcctgcctgactctgtacactccacctctgggggcagggcatagctgaacaaaaggcagcagaaacttctgcagacttaaatgtccctatctgacagctctgaagagagcagtggttctcctagcatggagtttgagctctgagaatggacagactgcctcctcaagtgtgtccctgacccctgtgtagcctaactgggagacatctcccagtaggggccgaatgacacctcatagagctgggtgcccctctgaaatgaagcttccagagkaaggatcaggcagtaatatttgctgttctgcaatatttgctattctgcaatatttgctattctgcaatatttgctattctgcagcctctgctggtgatacacaggtaaacaga

SEQ ID NO: 956507 - DNA, 622 bp, Homo sapiens
agtatatttttatggcagccaaaagtgtgccacaggtgcagtagcatgtgcctgtagtgtgagctgcttggtaggctgaggcaggaggatcacctgagcccaggagttcaaggctgcgttgcactatgatcacgcctgtgaatagccactgcactttagcctgggaaacatgagagaccccatctcttaaaaaaaaaaaaaaaagtaaaaaacttagaacactagttcaggaaattcaacatcaataacaaaataaaaacaaaaaatagagaaaaataaatcgataaaataactcatgagatttcccaaaaacaaaagaacatgaatttccaagctgaaagaccaccatatgttaagtacaattgatgaaaataagtgaacactaagacacatcattatgaagtttcagaacactaaggttaaagataaaattcaaatagaaaaaaaatgggaaggtcacaatgaaagaatcaagaattagaatggttttaaacttttcaacagccatactaaagaaggcaaaggagtgacatgtttaacrttctgaagaaaaacaatttacaaattagaattctgtattagtcaggatgggcttggttatactacaataacagacaactcc

SEQ ID NO: 956508 - DNA, 622 bp, Homo sapiens
agtatatttttatggcagccaaaagtgtgccacaggtgcagtagcatgtgcctgtagtgtgagctgcttggtaggctgaggcaggaggatcacctgagcccaggagttcaaggctgcgttgcactatgatcacgcctgtgaatagccactgcactttagcctgggaaacatgagagaccccatctcttaaaaaaaaaaaaaaaagtaaaaaacttagaacactagttcaggaaattcaacatcaataacaaaataaaaacaaaaaatagagaaaaataaatcgataaaataactcatgagatttcccaaaaacaaaagaacatgaatttccaagctgaaagaccaccatatgttaagtacaattgatgaaaataagtgaacactaagacacatcattatgaagtttcagaacactaaggttaaagataaaattcaaatagaaaaaaaatgggaaggtcacaatgaaagaatcaagaattagaatggttttaaacttttcaacagccatactaaagaaggcaaaggagtgacatgtttaacgttctgaagaaaaacaatttacaaattagaattctgtatyagtcaggatgggcttggttatactacaataacagacaactcc

SEQ ID NO: 956509 - DNA, 568 bp, Homo sapiens
ggccatgattctaagtgaattaatgtgggaacagaaaaccaagtatcacatgttctcactcgtaagtggragctaaacattgactacatatgaccattaaaaatggcagcaacggacactggggacaggaagaaagaagcggggcatgggctgagaaacaacttattagatactatgctcactacctgggcgatgggaccatctttatcccaaacctcagtagcatacaacatacacgtataacaaacctgcacatgtaccctttgaatctaaaataaaagttgaaattattattttattttcattttgattattattattattttttgagatggaatttcgctcttgttgcctaggttggggtgcaatggcatgatctcaactcactgcaaattccatctcccaggatcaagcaattcttcctcagcctcccaagtggctgagattactggtgcccaacaccatgcctgtttttttttgtttttttttttaatatatttttatcagagacagggtttgaccatgttaccctggctggtctcgaactcctgacctcaggtgatccgcc

SEQ ID NO: 956510 - DNA, 568 bp, Homo sapiens
ggccatgattctaagtgaattaatgtgggaacagaaaaccaagtatcacatgttctcactcgtaagtggaagctaaacattgactacatatgaccattaaaaatggcagcaacggacactggggacaggaagaaagaagcggggcatgggctgagaaacaacttattagatactatgctcactacctgggcgatgggaccatctttatcccaaacctcagtagcatacaacatacacgtataacaaacctgcacatgtaccctttgaatctaaaataaaagttgaaattattattttattttcattttgattattattattattttttgagatggaatttcgctcttgttgcctaggttggggtgcaatggcatgatctcaactcactgcaaattccatctcccaggatcaagcaattcttcctcagcctcccaagtggctgagattactggtgcccaacaccatgmctgtttttttttgtttttttttttaatatatttttatcagagacagggtttgaccatgttaccctggctggtctcgaactcctgacctcaggtgatccgcc

SEQ ID NO: 956511 - DNA, 493 bp, Homo sapiens
ggcacacgcctgtaatcccagcacgttgggaggccaaggcaggcagatcacttgaggccaggagttcgagaccagcctggccaacatggtgaatccccgtctctactaaaaatacacacaaaaaattagctgggtgtggtggtttgtgcctgtagtcccagctactcgggaggctgaggcacgagaattgcttgaaccagggaggtggaggttgcagtaagctgagattgcaccactacactccagcctgggtgacagaacgagactctgtctcagaaaaaaaaaaaaagagacaatgatatgaaaaggtcttacatgaatgagttttacgcatgattcaatctgtaagtcctataaattatttttgatggatggtatctattttcttcctattagtagtttkgggcaaaaataaatttaactgaatgtaaaaatattcagctctatggggagctgagaagaactaaatattttcagacacttgttatgtgca

SEQ ID NO: 956512 - DNA, 586 bp, Homo sapiens
agtctatggcataggttaaccatttgagctctgaatttttcttgtaatttgcctatcagtttaaaatgtacacaaaaatgagccataatatgtaatcagctatagtttcaaagggaacaacaaaattagaagataggatgttcgaaaccgttttttcttttcttttctttttttttttttaaatacagagatggggtttcactatgttgcccaggctggtctcaaattcctgggctcaagcgatccacctaccttggcctcccaaagtgctaggattacagggatgagccaacatgcccggcctgtttttccctttaagtctgagctcctggattgaacagaaaaagagaaaaagaaaagaaaggaatgcagaggaaaagattaagctttataggagggcttgtgagcctttcagccactgcatgatgtggggccagcacccctgccatccttgtttatctcgtgtcacagagaaccttagcaccccagacctacacagtgtggaacaaattccttccacccstgcaagtcactagttaaggtgagctgtttacagggggagtagagagccccttcagctcaaggc

SEQ ID NO: 956513 - DNA, 575 bp, Homo sapiens
ttatagtatcatacagaatagcctcactgccccctaaatcctctgtgctccacctgttcattccttcccgaattccctatccgcaggcaaccactcatctttttaccgtttccattgtgcttttttcagaatgtcatatagttggagtcacagaccatgtaacctttccggattggctccttttatttagtaatatgcattgaaatttcttttctttttttttttgatggtttaatagcactaaataatattcttattatttttagcactaaataatattccattgcctggatgtaccaaagtttatttattcattcgactaccaaaagatatcttagttgctttcaattatgaataaagcagccctacacatccatgtatagggtcttgtctggatataagtattcaacacatttgggtaaataccaagaagtttggtcgttggatcaaatgctgaaagtaagtttagttttataagaaattatcccactatttttcaaagtagctgcaccattttgcaattccaccagcaataaatagtttcctgttrttctacatctgcatcagcatttggt

SEQ ID NO: 956514 - DNA, 618 bp, Homo sapiens
gtatccagtcattaatgaaccattcaagatccttcttcatttctgttacagtgtttttgatctctagcatttcttcttgattctttcttacgatttcttcctctctgtcgctaatacctatttggttcttacatgttgtttactttttcctttagaaacattacatattaatcagttattttaatatcctgatttgataattccaacattccttccatacttgagtcctattctaatgcttgctctatctcttcaaactgtgagttatttttcctttgagtagcattgaaattttttgttggtaaccagacatgatgtagtgtgtaaaaggaactgcagcatatatgccttaagtaatattgcagtaaggtgtagaagaagggaatcattctgtagtcctatgattatgtcagagtttgagtgagactgctcagactgtaaacttcacacatacttcagtctttttcctctcaggtgggacagtatggttagagatggctggaattgggcatttcctttcttccacaaggatggataraggaaaatgaattgggtaattcccttccctcaattcactcagatcctgataaaaccccaataggttaggcaatggtaaaa

SEQ ID NO: 956515 - DNA, 618 bp, Homo sapiens
gtatccagtcattaatgaaccattcaagatccttcttcatttctgttacagtgtttttgatctctagcatttcttcttgattctttcttacgatttcttcctctctgtcgctaatacctatttggttcttacatgttgtttactttttcctttagaaacattacatattaatcagttattttaatatcctgatttgataattccaacattccttccatacttgagtcctattctaatgcttgctctatctcttcaaactgtgagttatttttcctttgagtagcattgaaattttttgttggtaaccagacatgatgtagtgtgtaaaaggaactgcagcatatatgccttaagtaatattgcagtaaggtgtagaagaagggaatcattctgtagtcctatgattatgtcagagtttgagtgagactgctcagactgtaaacttcacacatacttcagtctttttcctctcaggtgggacagtatggttagagatggctggaattgggcatttcctttcttccacaaggatggataaaggaaaatgarttgggtaattcccttccctcaattcactcagatcctgataaaaccccaataggttaggcaatggtaaaa

SEQ ID NO: 956516 - DNA, 572 bp, Homo sapiens
attggcagtggcttggtgttctcgggggtggaacttccagaaacaactgagaggacctctgctattgttgctgaggaggttcctgcctctgctacccccaagctgagaaaggaacaaaaagcctgagctcaccccagagctaaggtgcagtttgagaatgccaagctaagatctgtggccagcacctgagcaggagaggagcctacactttcagaacactgagaggggtgagtcctgcagtttttcgggctgctctgggagtggagcatgtctccctctgcagggtcagcctggaaatgtgtggtctatattcctgccatagcctctgcccaagggagcacagcagcctgaaatacctaacaaaagaattgtgggtacattgccagtgattggaaggggctctcgctagtcctacgagtggacctggtgaggggttaacctctctccatgcaccacagaccatggctacaaatataagaaaataygaagttgccatgtggccaagagcctatccactagccattactcttaagcaccatctactggatcacaaaccaaactacaacaccaag

SEQ ID NO: 956517 - DNA, 540 bp, Homo sapiens
gtttgtgtttaagctaagagttattacaaaaaagtctaaaagctacataattaaaatgtatataaagtaagaaagtcacaataaattaaggttgatttattatcraagaaatacattttaataataaatttagtgtactctaagtgttaaatgtttacaaagtgatgtcctaggccttcacattcactcaccacttaccctctcactcacccagagcaacttccagtcctgcaagcttcatttgtgttgtgtcctatattccatcttttatcttttacaccatatttttactgtaattttgctgcaattacctacagcattcagtaaagtaacatgctgtacagtgttgtagcctaggagtaataggcaacaccacatggcccaggtacagtaagctgcatcatctaggtttgggtaagtacactctatgaggctcacacaacaaaatctcctaacaacccatctctcagaacatatcttccttattaagcaatgcatggtggaagattgatttgtaaaactcttcccaaccactggttt

SEQ ID NO: 956518 - DNA, 605 bp, Homo sapiens
atcccagcagttggaacttcagttcctacaagcttcaccactgtgagataaaattctctggggccctaaataaacttggaaggtagtctagaccacaaagattgcaactcctaggtgagtcctagtgctgaactaagcccagagacaacgcactggaatgacaggtgacctactgagacaccagtctgaaaagctaaaaaggagtgctggcatcaactcttccctaactctgggctgcacagcccatggctccgaaagagacccgttccttctgcttaaggaggaaaaagagaatagtggggaggactttgtcttgtttcttggatattagcccagctacagcaacccagggtaactgtcagagtcatgaggtcccttttccaagcccagctcctagacaacatgtctagacacaccctggatcagaagggaagctgctgccttgaagtaaaggactcagtcctcacaggattctcacctgctaactaaagagctctagggccctgaataaccagcagtgacaaccaggcactacgttgagggcgtttggtgaaamtctgaaacttgctggattcaggtcagactcagcacattcccagttgttt

SEQ ID NO: 956519 - DNA, 771 bp, Homo sapiens
aatgcctggagacttttttttgagacggagttttgctcttgttgcgcaggctggagtgcaatggcgtgatctcagctcactacaacctccgcctcctgggttcaagcgattctcctgcctcagcctcacgagtagctggggttacaggtgcctgccaccacacccagctaattgttgtattttttagtagaaatggggtttcaccatgttggtcaggctggtctcaaactcctgacctcaagtgatgtaccggtctcggcctcccaaagtgctgggattacaggcgtgagccactgtgcccggccgcctggagacatttttgattgtcacagcttaggagatgcctctgacatctagaaggtggaggccagagatgcagcagaacatcttacacggcacagtacagctcccacaacgatcatctcgccccaaatgctgccgaggttgagaaaccctgctgtagtgtagtatcagttttacgtggttatctaattggatccgtgagccagtcatgttagatcataaatatgatttttcctgtttttcagataaaaaactgaggcatagacaggatgggtcacttggccaaagctctgccagctagtaagtgttagagccagaatttgaacgcaagtcttccagatgtcagaatctactccttctgcttaccctgctgcttcatrtctcacagtgatgccaaggaagatgcacattggactgtgggttgttttttttttttttctttctgtcatggtggctccagactagagg

SEQ ID NO: 956520 - DNA, 689 bp, Homo sapiens
ttcaaaatgtaaatccaatctgtcatrcacctgcacacaactcttccttggcctcccattgcatttggaaagaaagctcaacctctcaccatgggcctcaggggcatgtgtgaccagtccctgtcttttatgcagcctcacgccctcacccgtcctctcacttagcagacgtggactttcctatgactctgtactcaattcatcaaagataaaatctagtcatgtgtgtatgcatgactcgttaccacttactttattttcttaaaaaattttgacttagaaactttttttaaaattattaaatttttttcaaagatggtgccttactctgtcaccgaggctggagtgcagtggcatgataatggctcactgcagccttgaactcccacctcatcctcctgagtagctgggactacaggtgcatgctacgaccaccagctaattttttaaatttttaatctttttgcagagatagggtctcactatgttgcccaggctggtctcaaacttctggcctcaagtgatcctcctgcttccacttcccaaagcactgggattacaggtgtgagacaccaagcccagctctgttacaactgactgtggtatcttgaacaagtcagtttcctcacctctaaaatgggtacaataatggcacgccctcacaaggttgttgcagcctgtgtccccta

SEQ ID NO: 956521 - DNA, 814 bp, Homo sapiens
agacagctgaacaaacaaatgkatgatatgtctagtggagataagtgcaaggaatggaaataaagcagggtaaggagatagagagtgatggggtgggtggtccagaaaggcctctcatgtaaggggacattcgagcagagaccagagtgagtcaaggggcgagccacgtggccatgtggtagaagacatgagacgttggtctctgagccccaggcctcccctttctgtccccgacctcttcccccgaggagggtggaaactttctccgccctcctagcaaacttttctctcagctcccttattaacatccaggtacataactgagagcacattagggaggggagggaatatttgttgacatccactctgtacaagggattttgccagcagtagctcagctcacctcctgagaaccctgttgaaggtatttatttttcattttacatttggggatattactgcaggaccctcctctctgacttagctggcaaggctttgtgttcacacagcctcctggaccccttcatctaacttcattaactctatagcaggggaggcagcgagggctcctgaaggcaagagccagttgttttccctctgtctgcagtgcacctctgtacaagataggcgctcacttacaatcgggtgaatgaatggagtaaaaacgttgagctaaaggaatgattgatatgcccatgaaattcaggaactgaccaccagtcaggagaaaattagctcgaagtttcattgccatgtagaaatctcaggacaaaggtagtgtctgtgctcaagcctagccctctgccgtgtgggg

SEQ ID NO: 956522 - DNA, 200 bp, Homo sapiens
accccagcccctgggactgcctctcgctggccaagaactacagcttcccctaccccttctcagtccgtctcctggccccgctggacaggcgctcaggtccasacacccccaggagggcagaagcatgtggctggggcctcagactaggcaggcacgtgtgggtttctattaacacgactatactgagcactcactccaag

SEQ ID NO: 956523 - DNA, 213 bp, Homo sapiens
caccccagcccctgggactgcctctcgctggccaagaactacagcttcccctaccccttctcagtccgtctcctggccccgctggacaggcgctcaggtccagacacccccaggagggcagaagcatgtggctggggccycagactaggcaggcacgtgtgggtttctattaacacgactatactgagcactcactccaaggcgcctgaccat

SEQ ID NO: 956524 - DNA, 575 bp, Homo sapiens
ctcttcctctccactccctaataattggcaactactcatttgtttcccatctccacaaatgcagcattttaagaatgctatataaatggattcagacaatagggaattctttgagactggcgtagttagcataattcctgtgacgtccgctcgagttgttatgtgtaccaatactttgctcctttttattgctgagtagtattttttgctgtgaatgcactgcagtttattcatccatggaaggacagttaggatgttttcagtatgggctcttgtgagtaaaacttctatgttcatataggcttcgtgtgaacatgcttccatttctctgggtcaactgccaagagtaagaagccgccatgctgttttcctgagtggctgttccatgttaaattcccaccagcaatgtatgagtgacccagtttctccaccttctcaacagcatttggttttatgactattttttttacgttagccacagtgatatctcaccgtggttttattttgtgttttcctgctgctaatgtygttgaacatctttgcatgcattgatttatcatctgcataaccacttc

SEQ ID NO: 956525 - DNA, 766 bp, Homo sapiens
agggatatatgacaatgttgctggctctgaagatggaaggaagaaggtcatgagcttaagatatcctctaaaagctgaaaaacgcaaggaaatagattcacccttaaatcttccagaagagaaygcagccctgcaggtgacttattttttatgcaagtgaaatcatgtgggatttctaacctacagaactgtaaaacaatacatttgtgttaagtttgtggtaatttattatggcaacaatagaaaactaatacagaattttttttttttttagagagtggagtctcactctgtcacccaggctggagtgcaggggcgcaatctcggctcactgaaagctccgccttccggggtttcacaccattctccgtgcctcagcctcccaagtagctggcattacagggtgcccgccaccagcgcctggctaattttttgtatttttagtagagacagggtttcaccatgttaaccaggatggtctcactctcctgagctcatgatccacctgcctcggcctcccaaagtgctgggattacaggcgtgagccaccacacccggccactaatacagatttttatcaaagtcccagttgaaattttttgaggattttgtaatcttagtctaaaatctataatggctacaaaaaattaattcagcattgaaaaagaagagtgaagagaaggagtcattcattacctgtattaacatagtataaagccatagtaataactgtatgaaatgcatgtaaaaacagacaaatagacca

SEQ ID NO: 956526 - DNA, 671 bp, Homo sapiens
tgctctaattcaggaggcagtaatgtagcctgacctagcttccagttttgccctccttttgttgctataagtctggcctaggtccctatacatttttctttttttcctcttttttcctttcctccctattttttatcttcgtgggacatgatctcctaggaatgagcattcctcgtgacggaggacttgaacttctaggaataaaccatcccagcaacaacaaaccagcaggtgggaagaaaggaggaagcagcaacctgaggccaggaacccacattcctttttaaaatgcttttctccaaaagattttaaagaaaaaaaaggggggaaatgtgaaaggaaattaaattttgggacgccaaattcacttagccaaagggaagagtcaagctgggaactgggtcacgcaaacctgtctcccccttttggttcctaaataagatggctacaagatgaaaggctacacgcctcccccatattttgcccacaaggagattcctggtgagctgttgaaatttcaccatggtggccaggcgcggtggctcacgcctgtaatcccagcactttggaaggccgagttgggcggatcacttgaggtcaggagtttgagaccagcttggccaacatggggaaacaccgtctctaytaaaaatacaaaaagtagctgggtg

SEQ ID NO: 956527 - DNA, 749 bp, Homo sapiens
aattgttgtgattttaatttttatcattggtactttgcaaataaaaaaaaattttgactttcagtccaacatgtaaagactttaaactcatcaatcccatcctcataaccaaagaaagctgaacaaattgaaagttaacaatgctactgaattccatcagagaattaaagtcctgaagaaaacgaggaatacagagagtcacaatttggcaggaacagaagcagtcagaagacatgatctggtaggaacacttacagggaattgacaaactgttgaagactgacatggactggctcaaggggtaaaacctcctggggccagccttgaagaagctgtcatatgttctggaggttctggagtgtttacctccaggggcccaccaggttctcagcgtgaagatcacaggaaatactatcaagattctggcagaggaaaaggaaaagcaaccatttttaaacatccccatagtcttctgttcttcctaacaaagtcctgctctattttatcagaacttaaacaatttgggtttttccagagactgaaggaccttggggaagggaaatacccagttccagccttctctagccttcctgtctcacctaaagaggaaaacaaggctgacaagcacctttgaaggtcagggaccaagggcagaagcccactaaaatattaatcacaggagtgtagaacacttcccctcctcccacacatttccaattagactactgaayagtaataagggattacag

SEQ ID NO: 956528 - DNA, 528 bp, Homo sapiens
tgagaggaacacactggcagaaaaacacactgacagaggtcagcaggccatcgatggcagaatgacgtggacgccgaaggaaattcagccaatggtggttggaggagagcccrgttactacgcggccagactccaggggaagaccatcttcccactccatcccctttctggctccccacccatctcctgagagctacttccaccactcaatgaaacattgcactcattctccaagctcacgtgtaatccaatttttccggtatactagggcaagtaccccaggatacagaaggccctctgtccttgcaataaggcagagggtctaattgagctaattaacacaagctgcctgcagacagctcagcagaaagagcacagtttaacacatgcccactgggacttcgggatctgtaaacaatcctagacactgccgtggtgttggagccccatgacttgcccatctgcatgcttcccctagaggactgagcagtggggcactgaagaaatgagccacccctatcacatgcc

SEQ ID NO: 956529 - DNA, 715 bp, Homo sapiens
ggccataccctgcaaagccacaggagcagagctgcccaagaccataggaacactcctgttgcatcagcrtgacctggatgtgagacactgagtcaaaggagatcattttggaactttagtgtttaatggttgccctattggattttggacttgcatgaggcctgcagctcctttgttttggccagtatttcccatttggaacaggcatgtttacccaatgcctgcacccccattgtatctaggaagtaacctaacttgcttttggttttacaggctcataagtggaagggacttgccttgtctcagatgaaactttggacttggatttttgggttaatgctagaatgagttaagacattgttagactgtttggaaggcatgattgtgttttgaaatgtgaggacatgagatttgggaggggtcggggtggcatgatatggtttggctgtgtcctcacccaaaatgtcatcttgagttgtaagtcccataatccccacatgtcaagggtgggaccaggtggtggtaattggatcatgggaatggttccctacatgtttttttcatgatagtgagtctcaggacatctgaagtttttatgagtgtctggcatttcccctgcttgcactcccttcatcctgccacactgtgaagaaggttcctacttctttttttgccttccaccataattgtaagtttcccgaggcctcatcagcca

SEQ ID NO: 956530 - DNA, 599 bp, Homo sapiens
tcaaactcttatgaaagctgagagtggtgatcatgtaccagctaagagaaagagcccctggctcagtctctttcaaaatggctgctgtttgaatcatgtcaaaaaccccaatgtcctgtcatagcccccataattccaatttggttttgaatgcaactatttttatctggcgacttgaacacagttgttgttccgccctgaagtgacataatgagttctttgagcaggtcaaacaagtaagcaagttttgcaacccattctgtgtcactgaaatgttctgccaattgtaactgtttttctaaaagaaatctctagagcacctctcaagactcaaaaactctgaccagtgatctacatttagaaaggcatctcactactatgtataagagaagatgtttgtgctctgtgtccatctcacagagctgtgcaaacagacatgagttaaggacatgtactttaatgtggttgacaactgaaaagcactgttaagttcaggtgaattgttttggctagccagcatttctctatggatgacacagtgcatagactcgcattcaraagtgaccgctttgacctgagtattgaaatcagaaagctgt

SEQ ID NO: 956531 - DNA, 465 bp, Homo sapiens
gttgccagactgcactggagtgtctgtctgtcttcctggtgtcaccattgataatgggtgctctgtgacagtggggcaggatgatgaggggtcactgtgggcgccatccagcctgtgccaataatgacccaaggacaccacagagcaccaggtagtttagcaagtgctttcttacctgctctttctaaataaaattttcacagccacgcagcagagcatctattgttacattttgcagatgaggagactgaggttcagagcgatgatacgatttccccagggtcatatgaccagtacatggctgtgcattcacccaaacctaggtcttctgaggccagtcctggttcttaccactggcccaggatgctgaggtcacgatgccttcccctcagtgtggcctctccaggggcccgatgaccctccatctataagacctaraggtggaggtggggtgtgcatgccctg

SEQ ID NO: 956532 - DNA, 603 bp, Homo sapiens
tttgtttttgtttttgtttttttgtttttttgagacggagtctcgctctgtcccccaggctggagtgcartggtgcgatctcggttcactgcaagctccgcctcttgggttcacgccattctcctgcctcagcctcctgagtagctgggactataggcacctgcaaccacgcccggctaattttttgtatttttagtagagacggggtttcactgtgttagccaggatggtctcgatctcctaaccttgtgatccgcccgcctcggcctcccaaagtgctgggattacaggcgtgagccaccgtgcccagccaagtgcagtgtttaaccgtaatcctaggactttataggctgacccacttctggcgtcttgcacccctcccttctccatgattcatcccttagggtgggctgcctgcatgcacagtgcccttcttaagctttgggaggtgagcatgagcagtgtgtttaggaagttgtacgcatgcccatctgtggctttctttttcctgtggagtgcccccagaaggtcatactctgccattttgtctcctgatgtgtatgcccaggaagttgcccctctctggcatctgcatttaattaa

SEQ ID NO: 956533 - DNA, 848 bp, Homo sapiens
tggtgcccacccagattgagggtgggtctgcctctcccagtccacwgactcgaatgttaatctcctttggtgcctcacagacacacctaggaacaatacttagcatccttccatccaatcaagttgacattcaatattaaccatcacaaagggcatcacaagtaaacccagagctgaagtcagagtgcctgccccaagtaataatacctgcagcccctcctgcaggttggcacagactctagccctcagtagactaatccctgactcacttcatcaggtgtggcccttgtgcttccccaggtgtggacctgggctcatgttcatcagaatcacctgtgtgcttaataaaactgcagcctccaaagcctcactccggcctactgagttcctcttctggttggagtcaaggaatcttgccttctgacaagcaccctgtttgtattagtctgttttcacatgctataaagaacttccctgagactgggtaatttataaaggaaagttttaatttactcacagttctgtatggctgaagagaactcaggaaacttacaatcgtggtggaaggggaagcagcagtgtcttccatggcggcaggtgagagagaacaggccaggggaactgccgtttataaaaccatcagatctcatgagaactcacgcactatcatgagaacagcatgggggaaactgtctccgtgatccaatcacctcccaccaggtccctccctcaatacatggggattataatttgagatgagatttggatggggacacagagccaaactatatcactgtcctaggtcagtttcctagaaccagagctaagatgggaattcttgcgaacct

SEQ ID NO: 956534 - DNA, 717 bp, Homo sapiens
agaacagcatgggggaaactgtctccgtgatccaatcacctcccaccaggtccctccctcaatacatggggattataattygagatgagatttggatggggacacagagccaaactatatcactgtcctaggtcagtttcctagaaccagagctaagatgggaattcttgcgaaccttattgactggggaagcattgccctttgaaggagagtgagggaacaggatagggcaagggaagcaagttaagcaagggtctggtcctcaatggagactggctccagcccagtcccatggggcgctccagaacacagaccgcacctcgtagttgtcccatcttgacacaaggggagtggcattttgtgccctgtcattgtacccaagcaaaggttatcctctgctcacaaactgctacctgcagaagcaggctgttaatatgtgtcaggagtagccccccaggcaagataatccccctatgccaggacagttgagtggagcagctctcagcccctagcagccaacactcacagcagaccctcagcaatcaattcacatccccaggagattcaagctagagcaagatggcttggccaataaagctgaagaaagcctcaaatcgacatacttttccttcttctcccatggggaactagactaactcagcagccaaccaagacaaaagggttctttatggagtggtgtcctcataatcacatttg

SEQ ID NO: 956535 - DNA, 596 bp, Homo sapiens
gggcagggtggcaggactccctccctttgccatcctgcccatggaaacctactgccatttgtagagcataagcccctggagggcaggggctggggctggggctggatggtcctggtgtatagtctctgtccaacctgagtgattaattcaggtattttcttgaactatgtggctctgcttatttgctcaaggtcacacagcagttagtggtggcaccttctgatctgaaccagtcttctgactcccaagccaggggttgttccactagaaccttcattttgggattaggataagcacagaggcctacactctgtttcttatgtccccgccttgggcacccagggaaggctggcatgagtgcagcagcccgtgtgcttgtcagggagtagacacgcccgggagacatttcatccacgttcactgggtgttgtttatccttctctgcccaacacatgtgcctgcaggtacagcctttgaggagctgatgggttctccaggtcccttgctctcaagcctttgcaagttcttccaaatgtgatcaccttcacaactgaytgtccctggggtgtgctccttattcctcccattctgctaaa

SEQ ID NO: 956536 - DNA, 555 bp, Homo sapiens
tccaatcaattttgttcccttgctggcgaggaatatgatcctttggaggagaagagacattctgattttggaatcttcaggctttttgcgctggtttctccccatctttatggatttatctacctttggtctttgatgttggtgaccttcagatggggtctttgagtggatgtgctattcctttctgtttgttagttttccttctaacagtctggcccctctgctgcaggtctgctgtagttttctggaggtccgctccagaccttgtttgcctgggtatcaccagcggagacagcagaccagcaaagattgctgcctgttccttcctctggaagcttcataccagaggggcaaccacgagatgccgctcagagctctcctgtatgaggtgtctgtcggcccctactgggaggtgtctcctagtcaggatacacgggggtcagggacccacttgaggaggcactctgtcccttatcagagcttcaacactgtgctgktagatctgctgttctcttcagagctgccaggtagggacatttaagtctgctgaagctg

SEQ ID NO: 956537 - DNA, 590 bp, Homo sapiens
cagctgtgaatgttaaagtgttcattgaatgcaggcatcaagggaagcaactttccaggcatgcgcagkaagagacgaaatggcaaaatatgcccttctagaggcactccatcggaaaggggaagaaagcttcggatgggggtcgggcgcagaggctcacgcctttaatcccagcactttgggaggccaaggcaggcggatcacctgaggtcaggattcgagaccagcctgactaacatggagaaaccccgtctctactaaaaacacaaaattagctgggcacggtggtgcatgcctgtaatcccagctaccggggaggctgaggcaggaggatcacttgagcccaggaggcagaggttgcagtgagccgaaacggcgccattatactccagcctgggtgacagagcgaaactccatctcaaaagaaaaaaaaaaaagccttagatgggcatgcatgcagcttcctacacacactgctcgtgctcacctcccaagggtaaggagggcactgcgcatgcgggcagcccaccctcagggaagaatcatgggaaagaggcaagcctatacagtcctaaaatcaaggttaaaca

SEQ ID NO: 956538 - DNA, 639 bp, Homo sapiens
gtggagttttaggtttttccaaatataagattatatcatccgcaaacaaggataaattgacttcttccttttcaatttgtatgccctttatgtcttcctcttgtctgattgctctagctgggacttctagtactatgttgaataacagtggtgacagtaggcgtccttgttgtgttctagatcttagagaaaaggctttcaatatttcttcattcagtatgatactagctgtgcatctggtcgtatacggcttttattatgttgagttatgttccttctatacatagttttttgagggcttttaatcatgaagagatgtcgaatttcatcaaatgctttttcagcatcagttgaaattatatggtttttaactttctagtactttaaagagatgtttatacaatataaatccatctgaaatacaatgttacatataagatcaaaatctatgtattttctaaaaaaaaaaatcagtgttgtaatatttgcttaccacatcaatttttgtaaatctcataggtgttcaattcgaattttgttaataagtggtgaggttgagccaaattttattttaaattacttttcctttttttgcagatttataagtgttctggatgtrtgtattatttagggttccag

SEQ ID NO: 956539 - DNA, 554 bp, Homo sapiens
acacgaccaaattcacatataacggtattaactttgaatgtagatgggctaaatgctccaattaaaagacacagactggcaaattggataaagactcaagacccatcagtgtgctgtattcaggaaacccatctcacatgcagagacacacatagactcaaaataaagggatggaggaagatctaccaagcaaatggaaaacagaaaaaggaaggggttgcaattctagtttctgataaaacagactttaaaccaacaaagatcaaagaagacaaagaaggccattacttaatggtaaagggatcaattcaacaagaagagctaactatcctaaatatatatgcacccaatacaggagcgcccagattcataaagcaagtccttagtgatctacaaagagacttagactcccacacaataataatgggagactttaacaccccactgtcaacattagacagatcaaagagacagaaagttaacaaggatacccaggaattkaactcagctccactccaagcggacctaatagacatctacagaactctccaccc

SEQ ID NO: 956540 - DNA, 600 bp, Homo sapiens
tgctgtgcagaagctcttgagtttaatttgataccagttgtcaatcctggcttttgttgccattggttttggtttttagacwtgaagcctttgcccatgcctatgtcctgaatggtattgcccaggttttcttctaggatttttatggttttaggtcttacatttaagtctttaatccatcttgagttgatttttgtataaggtataagaaaggggtccagtttcagttttctgcatatggctagccagttttcccaacaccatttattaaataaggaatcttttccccattgcttgcttttgtcaggtttgtcaaagatcagatggttgtagatgtgtggtgttatttctgaggcctctgttgtgttccattggtctatatatctgttttggtaccagtaacataatgttttggttactgtagccttgtagtatagtttaaagtcaggtagcatgatgcctccagctttgttctttttgcttagtatattgtcttggctatgtgggctcttttttggttccatatgaagtttaaagtagtttcttccaattctgtgaagaaagtcagtggtagcttgatgtggatagcattgaatctat

SEQ ID NO: 956541 - DNA, 691 bp, Homo sapiens
atgttgcttcaaaggacatgatttcattcttttttatggctgcataatattccatagtatgtgccacattttctttatccaggctaccattgatggrcatctaggttgattccatgtctttgctattgtgaagggtgctacgatgaacctatgagtgcctgtgtctttatggtaggacaatttatattcctttgggatatataataataccatatcttcttaaccagttctctgtggttgcatagctgggatgttttcactgctgcaatccaacacagcactactatatgcacttgtatggctgaaattcttccaaatttaggattgtttttgaaaatctctggtagattcagataaataaaatttactgagtcaaagggtatgaacattttaaggctatgtatatgtatatgaatatgtatagtcacattattttctaaaatactgtcacatataaaaatattcattttgttaccagtggcgagtgtccaggttcttggcattttgagcaaagaattggacaaaatgcacaaacaaagaaaggaaagaatgaagcaacaaaagcagagatttattgaaaacaaaattacactccacagggtgggagcgggtgggagttgggtctatttggacccaaatagagaatattcttgggtccaaataccccctagaggtttcccattggccactt

SEQ ID NO: 956542 - DNA, 436 bp, Homo sapiens
attagccgggtgtggtggcaaatgcctgtaatcctagctacttggaaggctgaagcaggagtatcacttgaacctgggaggcagagtttgcagtgagyggagatcgcaccactgcactccagcctgagcgaccgagtgaaactctgtatcaaaaaaaaaaagaaagaaattccaaaaccgttttcaaagtggttgttttatatttccaccaatgatatatgagagcgtttgttaatctttatcctcaccgacatttagtattatcatagtggctaaaatgtgaaatcaagtgaaattgtatcttgtgattttaacttgtattttccctgttattaatgatgttgaccatcgttttatataattattggccacttatacgtcttgttttgtgaatagcctgttcaaggtttttgcttatatttaactggtgtgttta

SEQ ID NO: 956543 - DNA, 772 bp, Homo sapiens
atacttccactcagtaaaactttgcacccattcgccaagccaacgtgtgatctgattcttctggtacaccaaggcaagaaactggggayacagaaagccctctgtccttgtaacaaggtagacgctctaattgagttggttaacacaaggtgcccgtaggcaaactaagagaacaccctgtaacacacgcccactggggctttaggagctgtaaacagtcaccccgagacactgctgtggggtgggagccccacagcctgcccgtctgtatgttcacctagaggttggagcagcagggctctgaagaagcaagccacacccccaccgcatgccctgctagggggacaagggaacctttcccatttcaatactggtacaaaaatggacacatatatcaatggagcagagtagagaacccagaaataaagcctcatacctacaagcaactgacctttggtaagttgataaaaatcaacaatggggaaaatacaccctattgaataattggtgctgggaaactggctaggcatatgcagataagtgaaactggaacgcttcctctcaccgtatgcaaaaattaactcaagatggattaaagacttatgtgtaaggcactgatttattaaaatcctagaagaaaacctaggaaaaactcatctggacactgacctaggtaagtaatttattactaaatcctcaaaagcaaatgcaacaaaaacaaaaattgacaagctaaagagcttctgcacagcaaaagaaacaatcaacagag

SEQ ID NO: 956544 - DNA, 591 bp, Homo sapiens
taatcccagccctttgggaggccaaggcgggctgatcacgaggtcaagagatcgagaccatcctggccaacatggtgaaacctcgtctctactaaaaatacaaaaattagctgggtgtggtggtggtgcrcctgtagtcccaggtactcgggaggctgaggcaggagaatccactgaacctggaaggtggaggtggcagtgagccgagatcatgccactgcactccagcctggtgacagagcaagactctgtcttaaaaaaaaaaaaaattatatacaaaagcaatagtctattatatccaaagtgatactgatgaagaagaaagagaacttcatatatccataaaaattaacattaaatgcaatactaaaaacattcaaaataagtagccataatttaactcatcagttcatttgttcttgtgtaattaattgttattttttggatcttgggttaggtgctagtttcatgaagaacatctatttccagactaaaataagtcctggaaattctgattcattccctggtacagtctgaaagttgttgagctgatgtcagctctaacgccagtacccaagagtctattctttg

SEQ ID NO: 956545 - DNA, 574 bp, Homo sapiens
tgagaggctccacgggaaatgctgcatattttccatgttgaccaggagctgcagagccaccagccctctctctgtgttctcaaatccctcacactttacttacaactgattaagtctgaaaataacttggattatctattacgtgctaatgtagtgacattcatcacacatttttataaacaagtgcattcatctaaagaatgggtccaaatgtgttgaactctgagaaaagatgaggcatcgtctagttacctattctgttaaaggtgaaactttttaaatatttatgcaaatattaaaacaatttcaaataccttggttatgtgaggatgggggaggtgagataacttttcttaactgttattttgggttgtgttttataatagaaatatttggttatttgaaatcctcttgcttaattaggcagattcatactaaatggttcaacaggttgcatctataatcttgtgrctaaaagtggttattttcaagtcaatatttggggttcctttttagagatgagagtttactaattcaatatttgtagtcacaagatacataagagtcatgttta

SEQ ID NO: 956546 - DNA, 635 bp, Homo sapiens
ccattagaagctgtggacccaggcatccctgcactcaccrgggcccaggaagcccccctgccccgacaggctgagaagtgcctgctcccactgcttggtctctccccactcccagcacctgctccagtttcagatcaaagttgtggccgagctgggacactgtcacaacctggctgggtgtgtgtttgctcagggcagtgctgacatgccagcaccctgctgcctcggcacccccagactttgggtgctgacaagcatgagagggaggccaacgcggggctgagggaagcacagcgcaggccttgcagccgcccctcggcaggaacactctggatgccatgcacactgtggatggcaggataatggtggccggaggcagacaagctcctgggaagaaaggggagggtccctggtgaaactccaccttcagcttacagagggcttaaggcctggggcccaggctgtcagttccacagaccggagtgagaacttacggtgcttttccagggctcacccgtgactgcccatgcaccaatcagcacacactttcctctgaagcccataaaaacccccggactcagccagacttgggcagaagacaggacgacctgcttatggagaatagctgcccactg

SEQ ID NO: 956547 - DNA, 635 bp, Homo sapiens
ccattagaagctgtggacccaggcatccctgcactcaccggggcccaggaagcccccctgccccgacaggctgagaagtgcctgctcccactgcttggtctstccccactcccagcacctgctccagtttcagatcaaagttgtggccgagctgggacactgtcacaacctggctgggtgtgtgtttgctcagggcagtgctgacatgccagcaccctgctgcctcggcacccccagactttgggtgctgacaagcatgagagggaggccaacgcggggctgagggaagcacagcgcaggccttgcagccgcccctcggcaggaacactctggatgccatgcacactgtggatggcaggataatggtggccggaggcagacaagctcctgggaagaaaggggagggtccctggtgaaactccaccttcagcttacagagggcttaaggcctggggcccaggctgtcagttccacagaccggagtgagaacttacggtgcttttccagggctcacccgtgactgcccatgcaccaatcagcacacactttcctctgaagcccataaaaacccccggactcagccagacttgggcagaagacaggacgacctgcttatggagaatagctgcccactg

SEQ ID NO: 956548 - DNA, 528 bp, Homo sapiens
cggagtgagaacttacggtgcttttccagggctcacccrtgactgcccatgcaccaatcagcacacactttcctctgaagcccataaaaacccccggactcagccagacttgggcagaagacaggacgacctgcttatggagaatagctgcccactgtgggtctctctgagctgttctgtcactcaatgaagcacctcttcacattgctcaccttccacttgtccacgcacctcattcttcctggacatgggagaagaactcaggacctgctgaatggcaggtctgaaagagctgtaacacaaacagggctgaaacacacccattgtttgccacattgcaggcaatgaggagaggaggagagaaggagagaagagctgcagcccttcaaggagcccagacctaggagctccctgagccagggcagtgatgccccctttggggccctgcggttcctggtgtttccaagcttctgggcactaccgtattccctggtttcagccatggaagctgtgtgtggtatgcctggt

SEQ ID NO: 956549 - DNA, 533 bp, Homo sapiens
cagttccacagaccggagtgagaacttacggtgcttttccagggctcacccgtgactgcccatgcaccaatcagcacacactttcctctgaagcccataaaaacccccggactcagccagacttgggcagaagacaggacgacctgcttatggagaatagctgcccactgtgggtctctctgagctgttctgtcactcaatgaagcacctcttcacattgctcaccttccacttgtccacgcacctcattcttcctggacatgggagaagaactcaggacctgctgaatggcaggtctgaaagagctgtaacacaaacagggctgaaacacacccattgtttgccacattgcaggcaatgaggagaggaggagagaaggagagaagagctgcagcccttcaaggagcccagacctaggagctccctgagccagggcagtgaygccccctttggggccctgcggttcctggtgtttccaagcttctgggcactaccgtattccctggtttcagccatggaagctgtgtgtggta

SEQ ID NO: 956550 - DNA, 579 bp, Homo sapiens
aatattaggaaacttcattttggagatgtcagaagattcttgatcatccctaacaattcttttttttttttttttttttttkgaaacgggtttttgctatgtcacccagactggaatgcagtggtgggatctcggctcactacaacctctgcgtcccgggttcaagcaattctcctgcctcagcctcccgagtagctgggattacaggcacccgccaccatgccaggctaatttttgtatttttagtagagacagggtttcaccatgttggccaggctggtctcgatctcctgacctcgtgatctgcctgtcttggcctcccaaagtgctgagattacaggcgtgagccacaacgcttggccaatcatccctaacaattttacaagatttgaatcgtatcctaacaaatcagcaaccactaaacagataagctctctgttatcaacaccttgaattcagttagacagtctgggcttcccctttctaaactgtagcttagatcttctgggaaaccagctcaacacaagttgtatttttaaccatctgatatatgtagtacacaggctttttcatctcctt

SEQ ID NO: 956551 - DNA, 552 bp, Homo sapiens
atgaggaggattggggagaagaggaagaagaaaaagaagaggaagaagaagaggacrgaggaggaggatggaggaaggggagaagaagaaggaggaggagaagaagaagaagaagaggaagagggaggaggaggaagaggaggagaagaggaacaagaagaagaggaggtaggaggaagagaaggaagtagaagaagggggaggaggaggaagaggaggagaaggggaagaagaagaagaagaggaggaggaggaagagaaggaagaaggaaggggagaaggaggaggagaaaatattattcaattgagtagtataattcaattcaattcaagcaattagccaaaaattccactgaaatattgactgaattcaatttatccacattcaaagtatccttttataagccatttgattgctgccatgttacaagtcttcacagagctttaaggtatttcatgcatttattattctcaacagagaattttgaactaaaactcaccacattctatttacatatgcaaggaaaatatttaaaaatccaagcaaagttg

SEQ ID NO: 956552 - DNA, 690 bp, Homo sapiens
atataggcaacatgcattaggaggctggcccatgcagacagagaggagatgagggccagagacagagccctgggccactccgggggccagggagaggtgaaggcaccagccagtagatgtacaggaagggtctgggaggtgggtggaaaatctagaagagtgtggtgtctgggaagacgcatgaagaacacgtctcaaggaggaggtgggctcagctaattcaagtggtgccgatcggtcgatgaggggagtcattgacaagagtagcttccaccaagtagtggagggaaagtctgattgaggtgggttgggtcaacgaagaaaatggagtgagtgtgaatgtgaacagaatagtcttgctctaaagggcagcagagaaataggctgggatctggtgcccaggggagcaggaacaattcactcaaagcagcttgaaagaagacagaggatgacgtggccatagatgctgcaaggtgggaggtgaaattcgtaaagtgaaattaaagccaggtcagcaactgagcgtgaagatgaagaggcaatgcaggggctgagctgagagggaaatgtgtgcaggggtggccaagatgggggatggaccrgattgctgggcaatgggaagggcccctggatgcctgtggtcatctgatgtgagaccaccccaccagggctgtgtgcctttcttcagcc

SEQ ID NO: 956553 - DNA, 711 bp, Homo sapiens
caccacgcacagctaatttttgtatttttagtagagtcggggtttcaccatgttggccaggctggttttgaattcctgacctcaagcaatccacctgccttggcctcccaaagtactgggattacaggtgtgagccaccacaccaggtcaagattaaatattttaaaatatacagttcagtggtatttagtacatccacagtgttctgtgatgaccgcttttatcagattccaaaacattttcatcattttaaagaaaaccccataccttaaacagtcactccctattccctccttccaacagtcaatcaattggcaaatcaccaatctgctttccatctccatggatttaactatctggatatttcatataaatggattcttacaaaatgtggccttttgtttctgcattctttgacttagcataatgttatcaaggcttattcatgttgtagcatgcattagcccttcattcctttttatggctgagtaatattccattgtatggatttgatcacaatttgttcattcattcattcacctgttggcagacgcttggatcgttaccaccttctggcttttgtgaataatgctgctrtaaacattggtctacaaatattggtttgagtatattcttttgagtatatacctaggaataaaacttctgggtcatacagtaatcctgttgaacgttttgaagaatctctaaact

SEQ ID NO: 956554 - DNA, 717 bp, Homo sapiens
cagttacctgatggaaggaaagtcctccatcccctggcattatttgaacctctggatctakctgcttgcattgtcaatcctagttgttgctgttgttgttttaagtcaatttgaggtgggtgatttaaaaaaaaaataagtcctgctaacagaaaaggtattacagagaaatcagcaactatattcaaggatgaaaagtcaaaattgacaacttattcactgtttgtgagggaagctccagagtctttagaggggagacacgtagatataaatggaaaataatagctacagtaataagtactccataaatgtgagccctgtcaggtgctgctctaaaacctttacttgtattaattcacagaaatttcacaatcctatgaagaaggcattattgttatccccattttacagatataagaattcacaaaattagcaagtgttagagccaggaataaatgcctcattctataaacttcaaagatgtagttctcattcctactgtcgtaatatcttgagagatatttcttcacaaataacattggtccaaaaaattggtaagagtatccattataaaatgttacacagaaaaggactggtttttccacttatttgaataataataatactcttcctcattgaggactttacctagtctgaagatacgaaaactaaagtcaaggccaacgttagcctgtgtggctcccctgggcaaatgca

SEQ ID NO: 956555 - DNA, 447 bp, Homo sapiens
actggttgaattcatattgtttagacaaaatgtgattgcattagtgattagttattgattaatcatcttataaagattaaattatttgatttctttaattagttgattttttaaaaattggcagtgaaatccttgaaaaacattagacctatgtaaatagagcctgagtacatactcacataatatttaaccaatatttggacacactaccaaggcatcttgttaaggtattgaaataatgactgaattctccaaccactgaaaaaaatgagtgatggactaattatgtaaaaatgtcttttatcctgcatgtgattaaattggtctgttatttgaatgaaggaacaaacctttctggtygtactatccaaatcattatcatgcaggcaccatttctgttatttaaatgtaattttgtcaactgtagacatcattgttgcttctcca

SEQ ID NO: 956556 - DNA, 430 bp, Homo sapiens
atgggaaaatacacaatcacttttaaaagttatcaaacaaaaattaagttgaaaaaagggttaaccagtttccaacttccgtatatagckagccagttatcccaacatcatttattaaatagggagtccttttcccattgattgtttttgtcaattttgttgaagatcagatgattgtaggtgtatagcattatttctgaattctctattctgttctgttggtctatgtgtctgtctgtttttgtatcagtatcatactattttggttactgtattcctgtgatacagtttgaaggtgggtaatgtgatgcctccagctttgttccttttgcttaggattcaattggctattcaggctccctttgggtttcatatgaattctaaaatactttttttctagctctgtgaataaagtcattggtagtctgat

SEQ ID NO: 956557 - DNA, 598 bp, Homo sapiens
tatgggaaaatacacaatcacttttaaaagttatcaaacaaaaattaagttgaaaaaagggttaaccagtttccaacttccgtatatagctagccagttatcccaacatcatttattaaatagggagtccttttcccattgattgtttttgtcaattttgttgaagatcagatgattgtaggtgtatagcattatttctgaattctctattctgttctgttggtctatgtgtctgtctgtttttgtatcagtatcatactattttggttactgtattcctgtgatacagtttgaaggtgggtaatgtgatgcctccagctttgttccttttgcttaggattcaattggctattcaggctccctttgggtttcatatgaattctaaaatactttttttctagctctgtgaataaagtcattggtagtctgatagagcaaattcctgaatctgtaaattgctttgggcagtayagtcagtttaatgacattgagtctttctattcatgagcatggagtgtttttccatttgtttgtgtcattttttgagccatgttttgtagttctccatgtagacatctttcacctccttgattagctg

SEQ ID NO: 956558 - DNA, 731 bp, Homo sapiens
cacacaaagatccactggcttttaccttggaactctagctataagatagcaatacaaactcaccggtctacaaacatgttcacatggctaaactttgtttgcccaagtaggtcatccagtgaagggcatgaaccaacattttgggtaaagtattctccatgaaagtttgagtttttaaaggcaaaacctcttcagattccaaaggacagcagggccaaacagcaccacagaagaacatcatgtattgaccaggcctactcctgtttacataaaagactggatacatgacattccgtcccactttcattcaacagcaaaatgagacctatggagaggccaaacttctccagattccaaaaataatgaggccaaacagtatttcaaaagaataccagtttatcaaattctggttttccatgactatactaaaacacatacctaaacaatcaccaaaacacaatcccactgctgcagcagcaaacaaatcccaagagtgtccaagcagaaacagggtgctttgctctcttcattagttaggcttgttcaatctgcaaatggaaattctttcagaattccccaaattgagaagagaagataccattgtctggtgcccacaaaagataytcacccatctggacacagacgacaaatttcaaaggctgtttttcctaagcaatcaggaacacagttggggccagcagcggcaggaccagagagagatcaaaacccac

SEQ ID NO: 956559 - DNA, 572 bp, Homo sapiens
tgaagttgaagccagtgctcactgcacattctgaaaacttaaggatccttaagaactgtgctaaatctactgtgcctatgtgcaacaaagcccttatggcagcatgtctgtttacartatcatttactgaatatttgaagcctactactgagaactactgctcaggaaaaaagatacttttcaaaatagtactgctctttgacaatggacctggtcacccaagagctctgatggaggtgtgcaaggagatgaacgctgtgttcatgcctgctaacacaacacccgttctgtactccatggatcacagagtaattttgactttcaagtcttattatttgagaaataaattttgtaaggctatagctgccacacatagttattcctgtgatggatccgggcaaagtaaattgaaaacctagaaaagagtcaccattctagatgtcactaagaacatttgtgattcatgggaggaggttaaattatcaacattaatagaagtttgaaagaaatttattccagccctcatggatgactttgatgggttcaagactttggtagaggaagtaactgca

SEQ ID NO: 956560 - DNA, 577 bp, Homo sapiens
gttgcacagaagaatccacatggggagtgaagtgtagcaggtggcggtaagccccactctgctcccacacacttggcaaggcaggtctcacatcagcagtgttctgctagcagcagcttgctgggttccaggcagcctgcagtcagaacttcagattgccccaggccataagctttcctgaccaagacagaaactgggctttcaggccacattcatgaagcagaggccctcagcttctgtgcctgtggctacagcacacttcccagttacccctcagttctggccgatggggttcatctccgctgaagattatatcgcaaatctcagttgggagcttctctcaaaatgtgactgccacctgagttagctggcagacttctgcgatcttccctgtgagatagggtgaggaatggcttccctctgtccctgctggggcctgggagaacatgcaaagctgtccaaatgctgctccttctcatatgttccccaccacccaytaaatcagttccaattctagatagagttaaggcctccccccgtggcctggattgctgggatcttccatggcagtgtttgt

SEQ ID NO: 956561 - DNA, 583 bp, Homo sapiens
agacctataactagactaaagtcctggcaggcccctagaggtgaggttgagagtgtgaccaatgaggaggtgtgtgctatactcaaaaagarctgtttatctaatttatatgaacagaaatcaggggaacagttatgagaatgggtattaaaggcatgggataatagcagaaagaacatagagttggatcaggctgaatttattgattttggccctctagttgggactctgtttttaattttgcagctcagggagttaagaaaaggttctcaatagtttatttgcttggtaagctgaaatacggattaaaagatggcccactaggagtgagctggaaatgcctgatatcccttggtttaatgtcaaggaagggacccaaaggcttaggaagattgggatggtggagtggattcgtcactttagacttactcatcccagctgggagggtccagaagacatacccttgaccaaggcatttagaaatagatttatgagggcagcacctgcatctttgaagaggactgtaattgctcttctctgtatgtgagatctaacggtgggaactgcagtcactcaactacag

SEQ ID NO: 956562 - DNA, 612 bp, Homo sapiens
tgagtggggtccagaacaggagaaagctctgcagcaggtccaggctgctgtgcaagctgctcttccacttgggccatatgacccagcagatccaatgttgcttaaggcttcagtggcagataaggacgctatttgaacatttggcaggcccccataggtgaatcacagaggaggcctcaaggattttggggcaagtccctgccatcttctgcagataactactctccttttgagagacagctcttggcctgttactgggctttggtggaaactgaatgtttgactatgagtcatcaagttaccatgcaacctgaactgcctatcatgaactgggtgctttctgacccatctagccataaagtgggtcatgggcagtagcatcccatcatcaaatggaagtggcctatacgtgatcgggctcgagcaagtcctgaaggcacaagtaagttatataaggaagtggctcaaatgcccatggtctccactcctgccaccctgccttctctcccccagyctgcactgatggcctcatggagagttccctaagatcagttgacagaggaagagaagactagggcctggttcacagatagttctgcttgacatgcaggc

SEQ ID NO: 956563 - DNA, 596 bp, Homo sapiens
actgcttttgaagaacaggcatcactgcaaaaagaacaggggaaattctggtcacgatagtgcggagtcacctgcctctcacatgcttagaaatcagtcatttcttccgatgttccctctcctgtcttctgagacatagaagggtctgctagttacaactccaataaggtaagtaaatccatatagggacagtggcaaagaccagacactgagccaaggtacgcggctcacatccccacagtgtgaccttgggcaagttacttaacctctcttaaaattgtaccagctcctaggacggttgtgagggtaagtatacaataatgctagttttgtttttcctcttggaatttaaaatcatcttctaatttttaaggaagccatttggaaacctctgggctcctataactgctttaaatttgtagtgttgaaagcaatataaccaatagtttccctaggattagaagaaacgtaagagttactcatttgggagtcaaacatcccaggttatggatgaagaggaagtaactgatgcattttgtcctgcagtgaatttcccaggctatgctgagaaggraagacgcggcccctggcatgca

SEQ ID NO: 956564 - DNA, 594 bp, Homo sapiens
tgcttttgaagaacaggcatcactgcaaaaagaacaggggaaattctggtcacgatagtgcggagtcacctgcctctcacatgcttagaaatcagtcatttcttccgatgttccctctcctgtcttctgagacatagaagggtctgctagttacaactccaataaggtaagtaaatccatatagggacagtggcaaagaccagacactgagccaaggtacgcggctcacatccccacagtgtgaccttgggcaagttacttaacctctcttaaaattgtaccagctcctaggacggttgtgagggtaagtatacaataatgctagttttgtttttcctcttggaatttaaaatcatcttctaatttttaaggaagccatttggaaacctctgggctcctataactgctttaaatttgtagtgttgaaagcaatataaccaatagtttccctaggattagaagaaacgtaagagttactcatttgggagtcaaacatcccaggttatggatgaagaggaagtaactgatgcattttgtcctgcagtgaatttcccaggctatgctgagaaggraagacgcggcccctggcatgca

SEQ ID NO: 956565 - DNA, 584 bp, Homo sapiens
ccaggctataggtgaatttacacttctttttttttttttgagacggagttttgctcttgttgcccaggctggagtgcaatggcrtgatctcagctcacggcaacctccacctcccagggtcaagcgattctcctgcctcagcctcccatgtagctgggattacaggcatgcaccaccacgccgggctaattttgtgtttttagtagagatggggtttctccatgttggtcaggctggtctcaaactcctgacctcaggtgatccgcccaccttggcctccaaaagtgctgagattacaggtgtgagccactgcgcctggccaaattaaacattttctggttgacaactggttgtgtttgtctaaagacctgggatccatagaaaggaaatgctcaggttaagataaaagactgtggagaccagggttcttccaaagtctcacagtggctgcccttagagacaatcaatgacaaatgcttcctgttcagacctttaaaaggtgctaggctcttaatcttttcaggattgtgagggcctggaagaaacaagatctagctgtgttaatagagattctttacagacgc

SEQ ID NO: 956566 - DNA, 602 bp, Homo sapiens
tggcctgggatatggtctatcttggtaagcatgctacatgtacttggaaagaatgtgtatttatttgtcagtagttgggtggagtgtcagtaattgtgaactgggcaagcaggttgatagtggctagtactttgttcctgagtaaggaacatattcttactaacttcctgtctacttgttctatcaattactgagaagaatgtttaattgccaactctaattgctgatttgtctgttccttctttgagatctgtcagcttttcctttatgtatttttggagttctataattaggtacattcacatttagaattgttatatcctcataatacttttcttcctttatcattctgaaatgtccctccctatccctggtaatattccttgttctaaagtctactttgcctgatgttaacatagctatgccagctaatttcatgcctagtatatgcatggcatattttttctcatgtttttaatctttaatctatctgtgtcattatgtggatttaaagtcagtttcttgtagacagcataaatytgggccctgctttcttgtccagtttgacagtctttgtcttttaattgcagtgcttagcccgt

SEQ ID NO: 956567 - DNA, 578 bp, Homo sapiens
atgcccagccacaaacgttatttttaattytcgccagaaccctgctagggaagtaatcattactcatattttacaaacagaaagcctgagaatctgagagatttttaaaaacctccccacggtgacccacctgggccatcaacctgcacacatggtgacagctcctgctgttcccacccccagcgagctgaccgaccccgtctcctataattgcttctcaagccatctctgttacctggaccagccaggcagggacctggaggagcgcagggagccaggagggcaggcagttgacttgagggccgcagcggctgtcctggttaggtcgatggccactgggccctcccgccaagcctcaccggctctgccatccatgaggtccctgcctgcactggatagggattattggagcctctgcagggaaagggaacagaagggaagggaaccaggggcaagcagaggagacgagaagcagcaggagaccccaggaggaaggggcagggaggcaatgattgggggagaaaatggaaaagagggcgaagggaaaaggaagccttgttttactcaaggggtgggtt

SEQ ID NO: 956568 - DNA, 610 bp, Homo sapiens
acttggccaagacctcctggcggtgtggagctctgaagacacaggagggatgtcctccgagctgttcatgcctagacctacccccaggctccctctagcaatcagctccagtcctgggcctgtctgccttccgggaggagtgggggcccacagagctgcccttcccgcgctgtgtatggactcaaggcactgatggccttcggtgggccactgcataaatggatgtttctgcagtattgaaggccagtcaggcaaaccgtgtgctttcctacgcagtggggaatgtgtcgccctttccttacatcttggagaccaaagccaccatctgcacttgtgggtacattgtggcagtggtcggttagggtggtctttcaaagcagtttgaaatgcagacacttgtgggcgtcccctaaggcaggtgccctttacctggaggccgcattggtcacctagacccgcaaggctcacctgggccggaaggtgtggtcaagcgaggccaagtagcccagaggccacccctaagcacctgtggacatcatgagtccttgctggggtcctcacagagggaagacagcscccagggtaaagcctcaggtgctaagcactcgcg

SEQ ID NO: 956569 - DNA, 567 bp, Homo sapiens
atctcaacagtgggtttaaaatattcagtaatgtgttattccatttccagagcacaggcaagagtagacgtaacataattcttcagaaccctaggattttcagaatggtcaaagaccaytggcttcagcttaaagtcaccagtgacatttgcccctaacaagagagccagcttgccctttgaaactaagcactgagttctctctaggtatgaaagtcctagatgtcatctccttccaaaggaagtcttttgtctatattgaaaatctgctttttcgtctcgctgccttcatcaatgatcttagctagacctggataacctggtgttgcttttctgttaggtagcacttgctgcttcaccttgtactttcgtgttatggggacagcttctttccttaaacctcatgaaccagcctctgctgcttccaactttttttttttttttttttttttttttgagatggattttcactcttgttgcccaagctggagagcaatggcgtgatctcggctcactgcaacctccacctcccgggttcaagcgattctcctgcctcagcctccgtagt

SEQ ID NO: 956570 - DNA, 754 bp, Homo sapiens
gctggtattacaggtgcttgccaccaygcctggctaatttttgtgtttttggtagggatgggatttcaccatgttggccaggctagggtcaaactcctgacttcaggtgctctgcccgcctcagcctcccaaagtgctgggattacagatgtgagccaccatgccaggcctgagaaattgccaagaccagctcagtcgtggataccctaacccagtcgcactagaggaattaaagacacacacacagaaatacagtgtgtggagtgggaatcaggggtctcacagccttcagagctgagagcctcaaacagagacttacccatatatttattgacagcaagccagtgataaacattgtttctatagattatagattatagattaactaaaagtattccttgcagaaaacaaaggaatgtgccaaaacagagggatgggctctggctagttatctgcagtaggaacatttccttaaggcacagatggcttatgctattgcttgtggcttaggaacgcctttaagcagttttcctccctgggtgggccaggtgttccttgccctcattccagtaaacccacaaccctcagcgtggacttcatggccatcacgaacatgtcacggtgctgcagagattttgtttatggccagttttggggccagattatggccagatttgggggcctgtccctaaaaagaaatgtaattaaagtacagagaaaattaaaagggagaagaaagttcgtggagagatat

SEQ ID NO: 956571 - DNA, 564 bp, Homo sapiens
atgcatctgacaaaggactaatatccggaatctacaaggaactcaaaggaatcagcaagaaaaaacaaccccatcaaaaagtggccaaaggacatgaatagacaattctcaaaagaagatatacagacatccaacaaacatatgaaaaaatgttcaacatcaccaatcatgagaaaattgcaaattaagaacacaatgaaataccaccttactcctgcaagaatggccataattaaaaagtcaaaaaataatagctgttggcatggatgtggtaaaaagggaacacttttatgccactggtgggaacataaactagtacaactgtgggaaacagtgtggagattccttaaagaatgacaagtagaactaccatttgatcaagcaatcccactgctgggtatctacccagaggaaaagaaggcattatatgaaaaagacacttgcacacacatgtttacagcagcacaactygcaattgaaaagatacggaaccaacctaagtgcccatcaaccaatcagtagataaagaaaaggtagtatatgtaaaccatgaaatactactca

SEQ ID NO: 956572 - DNA, 522 bp, Homo sapiens
aaactatagccttagaaaacgtatttctgaaataataagacttgaaagtcagaatcattctggatccttgggctgcggggtggatgtggtgtcagcagcatgaaaacaacattcctctcctgtacgtctccatcagagctcttgggtgaccatgagcaggaatttttctgaaaagaatctctctttctgagcaacaggtctcaagagtggacttagaacatgcggtaagccatgctgtggacagaggtgctgtcatccaggcttcgttgttccgcggatggagcacaggcagaggagatttagcatcattcttaagggccctgggattttcagaatggcaaatgagcactggcttcaacattagcccctagcaagggggtcagcctgtcctttgaagctttgaagccaggcgctgacttctcctctccacctrtgaaagtcctagacggcatcttcttccgatagaaggctgtttatctgcatgtaaaatctgttgtttagtgcagcctccttcatcagtgg

SEQ ID NO: 956573 - DNA, 602 bp, Homo sapiens
ttatagaaatgtgagaaaaaactaataaggaaaattggtacagaggagtgagacattactataaagatacctgaaaatgtgaaagctgctttggaactgggtaatggtcagaagttggaagagtttgaagggctcagaagacaggaatatgagggaaaatttggaacttcctagagactggttaaatagttgtgactgaaatgcttaaagtgatatggacaataaagtccaagctgttgaggtctcagagggagatcaggagcctattgggacctggagcaaaggtaacttttgttatgcattagcaaagaatctggtggtattgtgcccctgccctaaggatctgtggaattttgaacttgagagtgatgatttagagtatctggaagaaaaaatttctgaacagcaaagcattcaagatgttgcttggctgcttctaacaacctaagttcacatgtgtgagccaagaagttatgtaaaactggaacttatatttaaaaggaaagtagaccataaaagtttgaaaaatttgcaacctgtccataaatagtaggccatawcatagaaaaggaaagcccattttctggggaggaattcaagcc

SEQ ID NO: 956574 - DNA, 556 bp, Homo sapiens
gtggttatctgtctctggtgtctctgcttggcctcccttgttggctcactcttgccttccttctccayattgctgtgactctcccctgtcccctcactctaagctcctccctttaatctactcagatcaggaaacaacagactgaaaacttaaccacatactccactttttattttacccaaaacagcaaacataagactgaaattttagcaatactttctaaagctttgagggtggaataagggaaatacaatgcaagaaaaagaaaccaattgggcatctgtgtatatagttcccaagtctattggccatggttttccctaccaaaggtttcctcctggacttttccttgcttatcttcctgctcaacaccacataatttgatattttatgcatgtatgagaggttgggacgggggagtaatttatccttgatagatggaagtatgtttgaccatctcttcctccactctgaatataggtcctcaaacctcttttagttccagtaaggtggtaaatctcccttacttcactatactttctttagcccaggtgcc

SEQ ID NO: 956575 - DNA, 454 bp, Homo sapiens; identical to SEQ ID NO: 946537

SEQ ID NO: 956576 - DNA, 584 bp, Homo sapiens; identical to SEQ ID NO: 948628

SEQ ID NO: 956577 - DNA, 709 bp, Homo sapiens
agttctaggtggaatctgcaacccagagtgagaacttacggtgcttttcccgggctcacccatggctgcccactgatcagttagcatgcactccctcccttctgaagcctataaaaacccctgactcagtcagacccacagagagaacaggtcaacctgcctgcagataggagctatccactccgggtctcctctctgctgagggctgcacacttgtcaggatgacctgcctgcagaaaggtgctacccactttaggtctcctgagacctgtgctatcactcaataaagcacctctttgccttgctcacacttcagttgtctgtgtacctcattctttctggacatgggacaagaacttgggacccaccaaatggtgggactgaaagagctattacacaaacagggctgaaacatgccccccactcaccatgttatgggcaacgagaaggagagaagagagaaggagagaagagagaaggagagaagagttgtggcccttcagggaaccctgatctaggagctccctgagccagggctgtgacaccttctttggggctctgtggttcctggcatctccaagcttccaggctccattgtgtttccgttyccagtcctcagagtggaaaccgcttgcagtatgcctggtctggccacagccttgcagggagccagcacctgtgctggcacctggagctgcctgccccgcag

SEQ ID NO: 956578 - DNA, 610 bp, Homo sapiens
aggcccatacagttttatgactctgtgaggcattccagttatacactccatttaaccctgaggctgctgaaaatcagcgcrtggtgaatatggcattcgtagggcagaccagggagatatcaagtggaaattgctgaagttagaaggctttgcaggcatgaatgctactcagcttattgaagtggctatcaaggtgtacattaactgagatcagaaggcaaagaaggaggctgaacggaggcttgggaaaaaggctgattagccagcggcagacctcacaggaagagaagctggctttgcaaggggtcatggatgcggtcatggaagaggctggtctggaaagggattcgagagccggccaaggctaaagagaaatcaatgtgcgtgatgcaaaaggaaaagacactggaaggatgaatgtccagagaataataacgtggagaatggttaaggccacggtatgaaaaaaccactggccaagggctaccataccctgtgaggaaccagacactgacctgatcaggatggcaggggctgaagaatatgaggtctcagacagaccgggctccttctctttgggcccctaggaacgtatggtcatattactagt

SEQ ID NO: 956579 - DNA, 610 bp, Homo sapiens
aggcccatacagttttatgactctgtgaggcattccagttatacactccatttaaccctgaggctgctgaaaatcagcgcgtggtgaatatggcattcgtagggcagaccagggagatatcaagtggaaattgctgaagttagaaggctttgcaggcatgaatgctactcagcttattgaagtggctatcaaggtgtacattaactgagatcagaaggcaaagaaggaggctgaacggaggcttgggaaaaaggctgattagccagcggcagacctcacaggaagagaagctggctttgcaaggggtcatggatgcggtcatggaagaggctggtctggaaagggattcgagagccggccaaggctaaagagaaatcaatgtgcgtgatgcaaaaggaaaagacactggaaggatgaatgtccagagaataataacgtggagaatggttaaggccacggtatgaaaaaaccactggccaagggctacyataccctgtgaggaaccagacactgacctgatcaggatggcaggggctgaagaatatgaggtctcagacagaccgggctccttctctttgggcccctaggaacgtatggtcatattactagt

SEQ ID NO: 956580 - DNA, 610 bp, Homo sapiens
aggcccatacagttttatgactctgtgaggcattccagttatacactccatttaaccctgaggctgctgaaaatcagcgcgtggtgaatatggcattcgtagggcagaccagggagatatcaagtggaaattgctgaagttagaaggctttgcaggcatgaatgctactcagcttattgaagtggctatcaaggtgtacattaactgagatcagaaggcaaagaaggaggctgaacggaggcttgggaaaaaggctgattagccagcggcagacctcacaggaagagaagctggctttgcaaggggtcatggatgcggtcatggaagaggctggtctggaaagggattcgagagccggccaaggctaaagagaaatcaatgtgcgtgatgcaaaaggaaaagacactggaaggatgaatgtccagagaataataacgtggagaatggttaaggccacggtatgaaaaaaccactggccaagggctaccataycctgtgaggaaccagacactgacctgatcaggatggcaggggctgaagaatatgaggtctcagacagaccgggctccttctctttgggcccctaggaacgtatggtcatattactagt

SEQ ID NO: 956581 - DNA, 605 bp, Homo sapiens
agagactcatcagaaactcaaaagaatgcaaccatttgtctcatatacctgtgacttggaagttctctcccaactttgagttgtcccacctttccagacataatcaatgtttattttacatatgttgattaatgtctcatgtctccctaaaatgtataaaattaagctatgctctgaccactttgggcacatgttgtcaggtccttctgaagctgtgttacacatgtgcatccttggcaaaataaaatttctaaattaactgagacctgtctcaaattttcagggttcacattttggtaactatgaagggattctgagtggaggtgtcgctgaactttgagaaatctcctctcagtgccagataccagcatgagctaactttatgactcaaaccaacagaacaatttgctgaggtctgagagaacccccttcagagaatccttaatctcctcaaattttgtttagatctaaagtttattttgccgtacaactccctcttttattggagttttacttgattccaacaagaaagacaagtttttctacttccatgatgatggaaggtgggtaactcytttgtggagtttgagctcacttctgacaag

SEQ ID NO: 956582 - DNA, 593 bp, Homo sapiens
gaataaaccaatatcaaggcccaaaattgaatcagtaattaaaaacaaaacttacaaaccaaaaaaatttttagaccagatggattcacaagagaattgtatcagatgtacaaagaagagctggtaycaattctactgaaactatttcaaaataacaggaaaaagaaatcctgtctaacccattgtgtgaagccagcatcaccctaatagcaaaaccaagcaaagacacattgaaagaataacattatgagctaatatctctaatgaacatagacacaaacgtcctcaacaaaatattagcacaccaaatctagcagcacatcaaaaagttaattcaccatcaccaagtaggctttattcctgggatgcaagtttgtttcagcatacacaaatcaataaatgtggctcatcacatacacagaattaaaaccaaagctgtatgatcatctcaatatttgcagaaaaagcttttgataaaatacttcattcatacataataaaaacactcaacaaactaggcatcaaaggaacatacatcaaaataataagagccatctatgaaacacccacagcaaatgtcacagtgaatgggc

SEQ ID NO: 956583 - DNA, 575 bp, Homo sapiens
agacatgtcagcccatcacacttctgaatttacatgtgattcctctatgcagacaactttgcmtcccctgaggaaagatagtggtttttcttaagagaaaatgacatttgtaataggaattttaagattttattacttcttctttcatctcctcaaaggaatgaagaaatgttggtgggcagatcttcctttcccatgcagtattttccaattaataatacttctttacctcaagaatattttctctttcagaagatggtaagtttaatatgcattttatttagtatataatatgatacaaactatgaagaacataaaggctatttgtaacatatggtgcccaaatctaaactgggatgaaggcacaagatgtcccagcactgtcctccagtggtgtcctggcctaacaccatcatcctaaatttcagttctaatgccttagcaaatggccagggtgtcaacagaaaagggatggacggcagtgacgacatactgcagtccaagtgaaatttgagtagagagttctaatgtaaatgactattttaaaagacgtttgcagtggccagacatggtgg

SEQ ID NO: 956584 - DNA, 588 bp, Homo sapiens
tttattttctattttttggaagcatgcatgcaaaattgatattatttttccttaaatgtttagtagaattcaccagtgtcatctaggcatggagctttttttgtaagaagaatatcaattatgaattcaatttgtttagtagttttaaggctatctatctagttctctgtgacttgttgaggaatcttttgtcagtttatgtatttcaaggagttaggccactacatccaagatgttgataagcctatagtttgctcataatattaccttttaatcattttaatgtctgtaaaatctgtatttatgtccattttcttcattattgatgttgggtatttatgtgttttatttcctgattagtccaattaatgctttagcattttttccctctgttcaaggaaccagattttagtttcattgatgtactttatttttttctctttttcttgatttttttcactcaactttattgtcttccttctaattacgttgggtttaatttgtttttctatttttgtttcttacagagaaatcttagctcactggtttttagatckttattcatgctgtatagttcccttgaaacac

SEQ ID NO: 956585 - DNA, 579 bp, Homo sapiens
ctgaagaaccagtcctgcaatatttaaactttatcatcacccatttgctcctgttatttattacatatatacaactgtaattatagtttggaccaaatatccatgtagttaaactcagttgtcactttattttctaaaactccttctggatggcaaaaattttctggtttaaagcaaaataattaagccattgcgttttacataggatagttagggatgattcttaaatttttttttttttttttttttttttttttttttttttttgagacggagtctcgctctgtcgcccaggctggagtgcagtggcacgatctcggctcactgcaagctccgccccctgggttcacaccattctcctgcctcagcctcccgagtagctgggactacaggcgcccaccagcacgcccagctaattttttgtatatttagtaaagacggggtttcaccatgttggccaggatggtctcgatctcttgacctyatggtccacccgcctggtcctcccagagtgttgggattacaggcgtgagcccccgtgcccggccaattcttaaaaattttaaactcaacatttta

SEQ ID NO: 956586 - DNA, 580 bp, Homo sapiens
aagttccaatactatgttgaataggagtggtaaaagagggcatccttgtcttgtgctggctttcaaggggagttcttccagcatttgcccagtcagtatggtgctggttgtgggtttgtcacagatgactctcattattttgaggtatgatccatcactacctagtttattgagagtttttaaaatgaaggaatgttaaattttatcaaaacacttttctgcatctattgagataatcatgtggtttttgtcttagttttttgcctttgtttacgtgatgaatcacatttattgatttgcatatgatgaaccaacctagcatctaggggatgaatcctacttactcatagtgaatacactttttgatgctgaatttggtttgccagtatttttttggattttttgaattgatgttcatcaaggatattggcctgaagttttcttattttgttgtatctctgccaggttggtaccaggatgatgctgatctcatagaatgagttatggatgagtcctcttcttcacttctttggaatagtttcagtagagatkgtatcagctcttctttgcacttctggta

SEQ ID NO: 956587 - DNA, 455 bp, Homo sapiens; identical to SEQ ID NO: 956364

SEQ ID NO: 956588 - DNA, 606 bp, Homo sapiens; identical to SEQ ID NO: 956362

SEQ ID NO: 956589 - DNA, 622 bp, Homo sapiens; identical to SEQ ID NO: 956355

SEQ ID NO: 956590 - DNA, 601 bp, Homo sapiens
tttcaatttcatgttaaagggccgctgaaccactctagtttatggcttagtttcagatattacctagtctttgatgggcagtacagatcctatgaacacctagagcrccatagccaggaatttaatctctagtagaaaaaaaacaagaactgcttctcaaataaaacagtccaagagccaggcgcagtggctcacacttgtaatcccagtgctttgagagtcagaggcaggaggataacctgagaccaggagttcaagaccagtctggacaatgtagtcccccatctctacgaaatatttttgcaggaggattgcttgagcccaggagttcaaggctgcagtaagtcatgatcacaccactacacaccagtctgggcaacagagttggagtgtctctgtttcaaaaaaacagaaattaaaaaaaaaaaaaaaaaaaagcccgggcgcagtggctgactcctgaaatcccaacactttgggaggccaaggtgggcagatcacgaggtcaggagatcgagaccatcctggctaacacagtgagaccccgtctctactaaaatatacaaaaaattagctgggcatggtggcgggtgcctgtagt

SEQ ID NO: 956591 - DNA, 601 bp, Homo sapiens
tttcaatttcatgttaaagggccgctgaaccactctagtttatggcttagtttcagatattacctagtctttgatgggcagtacagatcctatgaacacctagagcaccatagccaggaatttaatctctagtagaaaaaaaacaagaactgcttctcaaataaaacagtccaagagccaggcgcagtggctcacacttgtaatcccagtgctttgagagtcagaggcaggaggataacctgagaccaggagttcaagaccagtctggacaatgtagtcccccatctctacgaaatatttttgcaggaggattgcttgagcccaggagttcaaggctgcagtaagtcatgatcacaccactacacaccagtctgggcaacagagttggagtgtctctgtttcaaaaaaacagaaattaaaaaaaaaaaaaaaaaaaagcccgggcgcagtggctgactcctgaaatcccaacactttgggaggccaaggtgggcagatcacgaggtcaggagatcragaccatcctggctaacacagtgagaccccgtctctactaaaatatacaaaaaattagctgggcatggtggcgggtgcctgtagt

SEQ ID NO: 956592 - DNA, 593 bp, Homo sapiens
tggctcactgcaacctttgcctcctggttaaagcaattctctggcctcagcctcccaagtagctgggattacaggcatgcaccaccacgcccggctaatttttgtatttttagaagagacagggtttcaccatgttagccaggctggtctcaaactcctgacttcatgatccacccgccttggcctcacaaagtgctaggattacaagcatgagccaccactcctggccatgaatgtatttcttaaataataagacttgaaattctaacttatcccttgatccatgggctgcacaatagatgttgtgttagagggcatgaaacaacactaatctccttgtagatatccatcagagctcttgggtgactaggtaaattgtcaatgagcagtaatattttaagaggaatatttttttctgagcaataagtcacttaagtaggcttacaatattcagtaaaccatgctgtaaacagatgtgctgtcatctaggctttgttgttttatttctagaacataagcagagaagatttggcataattcttaagggccctagsgttttcagaatggtaaatgaccactgacttcaacttaaa

SEQ ID NO: 956593 - DNA, 586 bp, Homo sapiens
ggctcactgcaacctttgcctcctggttaaagcaattctctggcctcagcctcccaagtagctgggattacaggcatgcaccaccacgcccggctaatttttgtatttttagaagagacagggtttcaccatgttagccaggctggtctcaaactcctgacttcatgatccacccgccttggcctcacaaagtgctaggattacaagcatgagccaccactcctggccatgaatgtatttcttaaataataagacttgaaattctaacttatcccttgatccatgggctgcacaatagatgttgtgttagagggcatgaaacaacactaatctccttgtagatatccatcagagctcttgggtgactaggtaaattgtcaatgagcagtaatattttaagaggaatatttttttctgagcaataagtcacttaagtaggcttacaatattcagtaaaccatgctgtaaacagatgtgctgtcatctaggctttgttgttttatttctagaacataagcagagaagatttggcataattcttaagggccctagcgttttyagaatggtaaatgaccactgacttcaa

SEQ ID NO: 956594 - DNA, 657 bp, Homo sapiens
aagaccgctcaaggagagtctgaggtcagacacgcctrccactgcctctacctgatggtccttccctacctaccctggtaactgaagacaaagggcatatactcttgggagttcaagggggtggtggtgccccccaccacctgttcctccccattctactaccgctgatgctcttgaaatcaccaccttccgcaggaggacaaccaacccaaaaatagtgcattaagcaaccaaagccaaggaccctcacagagcccattttactcccccaccacctccaccagagcagatgctggtatcaatggcagaaagactcacagatggttcacatcagaggattctgtgcagacaacctccagtaccagcccagagcctggtagacttgctgggttgctagatccagaagagagataacaatctttacagcttggctctcaggaagccacatccctaggaaaagggggagagtactacatcaagggaacactccatgggacaaaacaatttgaacaacagcctttggccttagacctctgtgacaaatgagaagaaaccagaaaaccaactctggcaatatgacaaaacaatgttcttcaccacccaagaaaaaatcacactagcccaccagcaatggattccaaccaagaagaagtccct

SEQ ID NO: 956595 - DNA, 606 bp, Homo sapiens
tgtttatctgttcatttgttgatggacatttgagctgtttcccatatcatcttaactatttttaagtgtatgctacagtagtgttaactatatgcatattgttgtacagcagatctctagaaccttttcatcttgcaaaactgaaagtctataccccattgaggaatgactacttatttccccttccctccagcctctagtgaccacattaactttctgtttctatgagtctgactactttagataccttatatacatggaatcatgcagtatttgtctttttttgtgactggcttatttcacttagcataatgtcctcaaggttcatgcacttctagtatatgacaggatttccttctttttaaaaactgaataatactccattgtatgtatataccacattttctttatctagttaactgtcaatggatatttaggttgtttgctcccacctcttggctatcgtgaatattattgcaattaatatgagtgtgcatawtctcttccagatcctgttttcaattgttttgggtaaatacccaggagtaggattgctgaatcacataataattctactgttaatgttttgagaaatctccatactgt

SEQ ID NO: 956596 - DNA, 625 bp, Homo sapiens
aaactcaatgtttcagggatttcacttctagataaaaacccaactgcagctcatatctatattcaccaaaagatattacagaaatatttatctcaacatattgtctattattcataacaggcaaaaatctggaaacaatcccattttcatcaccaatgaagaaacaaatgaattgagctatattcatacaaagaaatactacacagtgaagaaaattcatagtctagtgctataaattatagtgaactaatatcaccaacataatattagaaaaaaagacaaaaagaacagttcaatttaccatgaagtctgagatgaagcaatcttataaagctagaggagattatatagtggtagactttatggaagaaaggcttataaatagtaactgggaggaaacatgatggaggcccctgggattctgctaatagcttttcttgacctggaggggagttacaagtatgttagtttataaagctatacatttatattttatgcacttaaaacgtttcttatatgcacaaaaatttaaaagaatgcrtagcatggtgttgttaccaagagaaatcagggtgtatctatctgttgtgagcagggtagaagctcttctaaacaatctctgatt

SEQ ID NO: 956597 - DNA, 434 bp, Homo sapiens
gacttgaacacagttgttgttccgccctgaagtgacataatgagttctttgagcaggtcaaacaagtaagcaagttttgcaacccattctgtgtcactgaaatgttctgccaattgtaactgtttttctaaaagaaatctctagagcacctctcaagactcaaaaactctgaccagtgatctacatttagaaaggcatctcactactatgtataagagaagatgtttgtgctctgtgtccatctcacagagctgtgcaaacagacatgagttaaggacatgtactttaatgtggttgacaactgaaaagcactgttaagttcaggtgaattgttttggctagccagcatttctctatggatgacacagtgcatagactcgcattcaraagtgaccgctttgacctgagtattgaaatcagaaagctgtccagtc

SEQ ID NO: 956598 - DNA, 659 bp, Homo sapiens
tcttaagactacatataagtgatgtatagaagtacagtgcctagcaaatatatgttcttgaaagtctttgctatactcacaaatttctcctcaagtttttagtttatcgtttatcactcaattgatacctcatatctaagaactagttcagacgtaggccataaatattaacctatgaattcaaggctagttattaatcagattttttaaccttttatgttacacgtggtttctgtttgaataacagattgtgttttactcttgaaatgaagtaacataaatcttgaaagctagttgtgaattgtttatgaggtgcaatgtaactaaaaaaatgaatttcagcttttccttgtgcttatagatatttaaatacaaaatgattagagatagataatgtaaatgtaatcatcacagatgattacattacaatacaaaatgtacctttcttacataaaaattttaagtagtagacatgctagaaaatgctgataaaaagtcaaaacttaaatatcacccatcagctcaytttcatactccaaatctttgaccagatctatgtgtctgtgtttgtgtatatatctgcatgtctgtataattttacctgtagtctgtccacctagtgaacaatgagcaggcactcagactggccggaatttggc

SEQ ID NO: 956599 - DNA, 565 bp, Homo sapiens
ttctaactactgagaaactaagtgagataatgagaaaaaaactgtggtattctagaatttaagagtctaggttctatgaggaaagcatcagacatacctcatttaagggacatactacaaaatgcataccaaaatatgtctcaaaactctcaaggtcatgaaaaataaggaaagatggaaaaactatcataagtcagaggaggctaaggaggcagtacaactaaatgcaatgtgggaactgggattggatcctgcaacagataaaggacattaacagaaaaagtggtgaaatctgaatacattcaaatatttactttttaaaaatattaaatatcagtagcataattaagaatttcatataatgttacgtttactctaaagctgcttccttgtaagtttggcctacaggtttctctgtaaatagagaactgtaacctaactggatatgtaaacagtctgtaatctactcttttaacacatggcttkgtctcagccaatgacagaagctatgtttcaaccactcacagccagccaactgtccaaataaggcaaacaccaagctgct

SEQ ID NO: 956600 - DNA, 615 bp, Homo sapiens
ttgttgctgtatctaaaaaggcatggccataccctaggtaatcttggttttctcctatgttatctcctagaaactttatagttttatacattaaacaacgttaatgtctataatctattttaacttartcactgtgaataatgtaaggcactgtgtctacaaaaatgtatatttttttgcctgtggatgtccaaatgtcccagcaccatttattgagatgatttttttaactttattgttttgattcctttgtcaaagatcaattaactatatttatgtaggtttattttgggtggattgatctatttgtctattctttttcacaaccacactgtattgattgccatagctttatagtatgccttaaaatcaggtagtttcagtcttcctaatttgttctactccttcaatatcaagttggctattctaggtcttttgcctcttcatattaactttaatatcagtttgccaatatccacaaaatagcttcttaaattattactgggggtggattgaatctatacagcaaattggaaaaactgacatagtgacaatcttgatttttcctatccataaatttggaatatctctcaatttatttagtactttaatttc

SEQ ID NO: 956601 - DNA, 594 bp, Homo sapiens
gtggtgccactgcactccagtctgggcgacagaatgaaatcctgtctcagaaagcaaataaaccaaaatgctaacaatttaaaatagtggggaaaaaaaaacttaaaaaccgaaaagaaaattctacatatgaaaagaagtgtattacaaggaaagatcatggacaattacacaaagtccctaagacctgactaactttcatgatgaccaactctattttgaagttttgcttcatgatgaatagctgcttttattttttagtcttttagaacagtgctctccttacagaatacatttacattcattttctagttggcattgctctttttaaaattcagttatgattttatatacaccaacatatacattctctatgaagtatttccatggctctgtgttgtttgatgacacacagaaatccattctgctttgcactcatatagagcacaggtttgacagaaacagtgctggtgattggatarcagtgccattgcctaagtgtcttcttattttgccaagcacataattattttcaaaccagtcagtaagttgagtggcttcttcaggcaaatgaagctttgaaagttcctagaa

SEQ ID NO: 956602 - DNA, 608 bp, Homo sapiens
gaagacaggaaaatgtgggaaagtttggaacttcctagagacttgttgaatggctttgaccaaaatcctgatagcgatatggacaataaggtctaggctgaggtggtctcagatggagatgaagaacttgttgggaactggagcaaaggtgactcttgttatgttgtagcaaagagactggcagcattttgcccctgccctagagatttgtggaactttgaacttgagagagatgatttagggtatctggtaaaaaaaattcctaagcagcaaagcattcaagagttaacttgggtgctgttaaaggcacttagttttacaagtgaagcagagcataaaagttcagaaaatttgcagcctgacaatgtgatagaaaagaaaaacccattttctgaggagaaattcaggctggctgcagaaatttgcaaaagttactaggagccgaatgttaatctccaagacaatggggaaaacgtctccagagcatgtcagaggtcttcacrgcagcccttcccatcacaggcccagaggcctaagagaaaatggtttagtgggacaggccccctgtgctgagtgcagtctagggacttgatgccctgtgtcccagc

SEQ ID NO: 956603 - DNA, 556 bp, Homo sapiens
agacttgtctcagatacgttttggttaacacagtaaagatttttatgactggccaaatctttatttcctgaaggtgatatgacccacttttttaggaatccatgaaaaattttggagatccgcaaatgcatttactatctgtaaacatagaatattatcttctattgtgcataaacatttctcaaaatgttcacaccctatttctttaaagaaaatatatatcctctacacctgtttgtgttccttaataacatataattgtctccttgtgaaatcatgcacttctagactttccagatattcctcaccttctgaacttttatattgtgttttcttgaattaattattaataaagtctacaatattcttaatttttcacaaatttattatttattgtttattcccttaagtgtgacctgtctctgcctgtgttagttacatattgctgcaaattatctcaaatgtagtggtttatgagaacaaacatttattatcatccaatttctgtggtcagaaatttgaagctggcttagctargcaactcaatgtctttcat

SEQ ID NO: 956604 - DNA, 650 bp, Homo sapiens
tcattatgttaaggtcatccaaactggaaattaagaagtcaaattatccttgtttgctgatgatatgatcttatatttggaaaaatctaaagacttcccaggaaaactgttagaactsatcaactgattacagatttatttcacaaacgtaatgatctccagttccatccatgttgttacaaatgactggatcttacatgataaacatcacatgttctcacttatttgtgggatttaaaaatcaaaacaattgaactcatggacaccaagtagaaggatggttaccagtggctgggaaaggtaatggagggttggggggaggtgggcatgattaatgagtacaaaatcagttacaaagaatgaataagacctacttttaatagcacaagagggtgactatactcaataatcacttaattgtacattttaaaataacttgaatagtgtaactagattgtttctaactcaaaggataaatcctggaagggatggaaaccccactttccatgatgtgtttatgtcacattgtatgcttgtatcaaaacaactcatgtaccccataaatatatacacctactatgtactcaaaaacattaaaataaaaactaataaaaaaagcttcaaaaaacaggctgactttcttggtaggg

SEQ ID NO: 956605 - DNA, 637 bp, Homo sapiens
atgtatgtgtatttgaaaagtcattttatcagttgatatagtttggatatttgtcccctgaaaatctcttgttgaaatgtgagcccccatggccgggcgcggtggttyacacctgtaatcccagcactttgagaggcccaggcgggcagatcacaaggtcaggagatggagacaaacctggctaacatggtgaaaccctgtctctactaaaaatacaagaaaattagccgggagtggtggcgggcacctgtagtcccagctactcaggaggctgaggcaggagaatggcgtgaacccaggaggcggagcttgcagtgggccaagatcgtgccactgcactccagcctgggcgacagagcaaaactccgtatcaaaaaataaaaaataaaaaaaaaagaaatgtgagcccccagtgttggagtgggtcctagtgggaggtgtttgcgtcacaggggccgatccttcgtgaatggctggacgtcctccctgtagttatgagtgacttctcacactactattagttccctgaacagtcagtttttcctctccacaatctccacactcttgctccctctgttgccatgtgacatgccagttccccttgacttctgccatgagtaaaatcttcttgagtgct

SEQ ID NO: 956606 - DNA, 600 bp, Homo sapiens
tccccagaatatggatttttcttttctatcacatattcaggctgcatattttccaaactcttatgctctgcttctcctataaaactaaatgcctttaacagtacccragatacctcttgaatgctttgctgcttagaaatttcttctgccagatactctaaatcatctttctcaagttcaaagttcaacaaatctctagagcagggacaaaatgccaccagtctctttgctaaaacataacaagagtcacctttactccagtttccaagaagttcttcatctccatctgagtccgcctcagcctggaccttactgtccatatcgctatcagcatttttggcagaaccactcaacaagtctctaggaagttccaaattttcccatattttcctgtcatcttctgagccctccaaactgttccaacctctgcctgttacccagttccaaagttgcttccacatttttgggtatcttttcagcaatgacccactctactggtaccaatctactgtattagtccattttcacactgctgataaacacatacctgggagtgggaagaaaaagaggtttaattggacttacagttccacatggctg

SEQ ID NO: 956607 - DNA, 609 bp, Homo sapiens
gtttttgttatatattttattttgagtaactttgtggtttctgattttcaaggatgtggttcgtattttcaacattgataagtttgtgtgcataatgttatctggattttttwaaatatttttattagctgtacaatctgtgctgatatctcttctttcaatcctgatattggcaatatgtgtcatctctccttttttcatcctgagtcttgctggaggtttaatcattgtattcttattccaaataaacttcatttaaaaaaattttctctattttgttctgttttcaatttcattattatccttttattttatattgttttcttcctcctgcttaatttttgcttattttgctcttgtttatctagtttattaggctatcccaaagagtaattgtgaatttgttccaattttttttgtctgtcagattttgctttatatattttgaagcactttttcaagttgaatgcacatgtaggattgtcatattttcctgcttaattggcctttttatcattatgtaatattctattttacatcttttaatttcatttgttctgaaacctacattttctgatattgacatagccactgcagctttcttttgat

SEQ ID NO: 956608 - DNA, 609 bp, Homo sapiens
gtttttgttatatattttattttgagtaactttgtggtttctgattttcaaggatgtggttcgtattttcaacattgataagtttgtgtgcataatgttatctggatttttttaaatatttttattagctgtacaatctgtgctgatatctcttctttcaatcctgatattggcaatatgtgtcatctctccttttttcatcctgagtcttgctggaggtttaatcattgtattcttattccaaataaacttcatttaaaaaaattttctctattttgttctgttttcaatttcattattatccttttattttatattgttttcttcctcctgcttaatttttgcttattttgctcttgtttatctagtttattaggctatcccaaagagtaattgtgaatttgttccaattttttttgtctgtcagattttgctttatatattttgaagcactttttcaagttgaatgcacatgtaggattgtcatattttcctgcttaattggcctttttatcattatgtaatattctattttacatcttttaatttcatttkttctgaaacctacattttctgatattgacatagccactgcagctttcttttgat

SEQ ID NO: 956609 - DNA, 699 bp, Homo sapiens
atccactggcaggtcatcctgacatctgtccaactctggctgagtcggggttttatgggctcagagggaggaagtgctgattggtccatggttggccatgggtaggcctggaaaaagcaccagaagttatcactctgggccacgattccacccagaacttatagccctaactccaggcttcaggctctccttggcttgaaggtggaccctcagctttctgcccagaaggctgtctgcctcctgctgccatcaacatgttgtatatggcccccaggctgttcatgccaaggggtgcctataggcccctgctgagccacatttagtcttccctcagcctccctcctatgctcctaggtgcccaatgtccagagggggttgaggtagcaggggtctggtgtgtcagcacctccttgagtgtgcacacacctaggtgggatgggacggcacctgggctgggccacaactttgctccaaaatcggagcaggcaccaggaatggagagaggtcagggatgggagcaggcacttcccagcctttgggggaagggggagttcctcacctcctgagagcagagcgygactgtgcggctgcacatgcaccagggagtgcagggctcccaccccacctactcggtaggaggcagggcttcttcctgttcctggcccctgccggctctgtggagtgcacaaacctggccag

SEQ ID NO: 956610 - DNA, 727 bp, Homo sapiens
tatttaccattttgaaagtctaatgcccttaagaattatgctaaatctcctctgcctgtgcatgtaagcrgaccaacaaagcctggatgacagcacatagctttataacatgatgtactgaatattttaagcctacagttgagacctactacgcaagaaaaaagattctttcaaatattactgattattaattgacagtgaatcttgtcacccaagagctctgatgcagatgtacaagaagataaatgttgttttcatgcctgctaaaacaacatccattctacagttcatggatcaagcagtaatctcaactttcaagtcttattattaaagcaatacatttcataaggctgtagcttttatagatagtgattcctctgatggatctgggcaaagtaaattgaaaactttctggaaaggatttaccactctacatgccattaagaatgtttgtaatgcatgggaagaagtcaaaatgtcgttagtaacaggagttaggaataagttgattccacccttcatggaggacttgagaggttccaaattatcagtcagaatgtaacttcaaatgtggtggaaataaaaagagaactatagtaaaagtggagcatgacgatgtgacataagacttgctgcaatcttatgacaaaactttaacaaacaaggatttccttcctatggatgagcaaaggaagtggtttctagatggagtctacacctggtgaag

SEQ ID NO: 956611 - DNA, 642 bp, Homo sapiens
aagcaaataaccacattaaaatatgtttagcatcatgagtctttagaaaaatgcaaataaaatccacaatgtggtagccctaaaatatccattagaatggctagtattaaaaaaataatttgggaggccgaggcaggtggatcacctgaggtcaggagttcgagaccagcctggccaatatggtgacaccccgtctctactgtaaatacaaaaattagccaggcatggtgatgtgcacctgtagtcccagctactcggggtgctgaggcaaaagaatcgcttgaacccaggaggcggaggttgcagtgagctgagattgcaccactgcactccagcctgggcaacagatggagactccatctaaaaaataaattaattaattagataaaataaaataaacatcccaagtgttgccaagtctgtgcagcaacctaaattctcatgcacttctggtaggaatatgaaatgtatacctacttctaagaaaaaacttgacactttttaaaataataatcattcacctatatgaacgtgccrctccacttctattattcatcctccaaaaatattaaaacatatatattcacacaaagccttgtacacaaaggtttataacagcttcatataatagttcccaaatgg

SEQ ID NO: 956612 - DNA, 590 bp, Homo sapiens
atggacttacagaataccttatccaccatcatggtattctgtatctcattgcatcctatcaaggaactcacttcatggccaaagaagtgtagaaatgggctcatgatcatgaagttcactggttttaccatgctccctaccatccttaagcagttggcttgattggatcgtgatatggcgtttttaagactacgttattgtgttcattaggtgataactggggcacttgcaagtatgggataaaattctgcagaggatcatatatgctctgaatcagcatctgatgaaacaggaaacatggtgctgtttcactgatagccaggattcaacagtctaggaatcaagaggtggaaatgagagtggccctactccctattactcctgttaacccactagcaaaatgtttgcattctgtttctgtgactttatgctctgctagcctagaggtctttattccagaggaaaaatgcctccaccaagagacacaacaatgattccattgaagtgaaggttaaatkgcaacaaggatgctttgggctcttcctgcctctgagtcaacagaacatggagggtgtttcggtgttgggtga

SEQ ID NO: 956613 - DNA, 411 bp, Homo sapiens
ggtgttgtttctccactttatgtctttgccttgtcgaagatcagttagctataagtatttgggtttatttctgggttctctattctgttccgttgatctatgtctatgtgcctatttttrtaccagtaccatgctgttttggtgactatggcctccctggtgtgaaacccacttgataatggtggattatcttttcgatatgctgttggattcagttagctagtattttcttaaagatttttccatctgtattcatcaaggatattggtattctttttttttgttttgtcttttcctggttttggtattagggtaataccaacttcatagaatgatagcagaaagatttcgtctttctctgtcttgtagaatagtgtcaacaagattagtaccaattatttttcaaatgtc

SEQ ID NO: 956614 - DNA, 650 bp, Homo sapiens
ataccctccaaagccacaggggtggagctgcccawcaccatgggagcccacctcttgcaacagtgtgacctggatgtgagacatagagtcaaaggagattattttggagctttaagatttattgactgccctgctcggcttccgacttgcagcggaactgttgcccctttgttttggccaatttctcccttttggaatgggtgcatttaccaaaagcctttacccccattgtatcttggaagtaactagtttttattttacaggctcataggcggaagatatttgccttatcttagatgagactttgaatttggacttttgagttaacgctagaatgtgctaagactttgggggctgttgggaaggcatgattgtgttttgaaattgtgagaagcacatgagattttggagtgaccaggagcagaattatatggtttgggtctgtgtccccatccaaatcttgtgtcaaactgtaattttcaacattgaaggaggagtgtgctgtgaggtgattggatcatggggcaagtttcctcactgctgttctcatgatagtgagttctcaggagatatggttgtttaaacatgtgtagacttcccaattttctctctctcctactgcagcaatgtgggacatgcttccttaacct

SEQ ID NO: 956615 - DNA, 752 bp, Homo sapiens
aagacagagaggcttcactccatagccactacaactccgggctgtgaggagtactgccaaactaccaccgatgtacccttaaggctcaaggaagggctcttaagtcagcttgttgtgaatgatgcctggcctgggactcgcccttcaggtcagcaggctcctttctggcccagggaaggtccagaagttccatgaaaagttcaagtcctggaatcagggacccaaagaggtcacttggtgctctaccttcctgtggttaggctggtacctaaggttcaagataaagtcccctttactttccttctgcttttctcaagcagaaggggttttgccttgtagccactatggccagctatgtactgaatttcacttgaagccatcaagtcagaggttcatccaaggcgctcgatttaggacctgggtattgctgctggttattcaggacccaaggattcttcaattaccaggtgttgaatgctgcccagactgggttctttcctttaaggcagtgggttcccttctggcccaaggtatgtctagaaatgtcatcttggagctaggtcctggaacaatggccctcccaactctaaccagtatcttaacctgttgtggctgggctggtattctagatscaagacaaagtcctccccactcttccttctcttctccttaagcagaagaaaaaggtgttttttggaacttcaagctgtgcagcctggggttagggtaagggtgatgccagctctccctta

SEQ ID NO: 956616 - DNA, 481 bp, Homo sapiens
tatcataagcagttgagggactaggaagtggggagatcaggaagtaggtcctctagagatgaggaggcactctgctagatggcttttaaaatatttcctccagaggaatttgcctcattaacagcattttttggtcttaaaaatcagtctttgattttatacaatgacaatttctgactctgttataaaggtatgctgtcctagttcttccgtaagttcatcacgtgttttcaccatgttgtcattaggcatgttttctgcagtattaacatcgtcttcattgttcctattatcataattaccatgattcttaaaaatgtcagctagttctccattggtcaatgaacgaacaactggagcctcaktatcaacattaaaaatgtcttcaatatcaatttctttcagtttatcggattctgaaggtatactttttgtatatttaaggagataagacatctttttttcctcacttatcatatag

SEQ ID NO: 956617 - DNA, 541 bp, Homo sapiens
tgaacatgatgttgactctgggcttgccgtatatggactttattgtgcttyggtacattcattctatacataatctgttaagagttttttatcgtgaaaagatattgacttttgtcaatttatttttctgcgtctattgatatgctcatactaattttcaataaaagtcccaaaaatattcaatggagaaaggacaggcataaaaatggtgttgggaaaactatatatacacatgtaggagaattgattggatctttatcccttatcacatccaaaaataaactcaaaattaattaaagacaaatataagacacaaaactctaaaacttccaggataaaacaaagggagaaagtttcacaatattggtctgggaaataatattttgggtttgactcaagaagctcatgcaacaaatgcaaaagtagacaaatgtgaatacatcaaattaaaaagcttccaaacagcaaaagaagcaatcaacagactgaagacacaactcagagtgggagaaaatatttgtaaaccacacattcaacaaaa

SEQ ID NO: 956618 - DNA, 610 bp, Homo sapiens
ggtgcctacccagattaagggtgggtctgccttgcccaacccactgactcaaatgttaatctcctttggcaacaccctcacagacacacccagaatccatagttttcacccttcaatccaattaagttgacactcagtatcaaccatcacaattattattactttgcatgtgatttttattataattttattatcataagacaagggattctcatatcataagagaatacacatgaaacagttttagttggagtttggtctttgccaaaatccaattaaatattttaagaagatagaacactcagttgaacaaatagccaagaaggaatttgaggagagtaggaatttgatagcacttttctcatctttgctctacattcttgtatttgatatagtgaggcaagatgaagtagaaaacttcctaatttctggatcctccatcaggaaggaatgaaaagaatgaaacttgtgtttaacattctggattttcctggagaatgttcaaggaattggtttctgttctacctgatatgggccattgatggtaatcattgtataccttggamaccaagtaggaggtctgtagtgccatggagtattaggacaatga

SEQ ID NO: 956619 - DNA, 600 bp, Homo sapiens
ttgccttatttgaacatggttcaaacagttggccacatttgattggccaaaacttggtgattggcacaagagtagacgatagtctgtttatactttcatttagtctagagtttgygatgtacagagaaacgtttaggccaaacttaaaatatgtaaggagggcagggcgcagtggctcacacctctaatcccagcactttgggagcgcaagtcgggcggatcacgaggtcaggagatggcggccatcgtggctaacacggtgaaaccccatctctactaaaaatataaaaaaaatagcgtgcgcctgtagtcccagctactcaggaagctgaggcaggagaatcgcttgaacctgggaggcagaagttgcagtgagcagagatggtgccactgcattccagcctgggcgacagaacgagactctgtctcaaaaaaaaaaaaaaaaaggaaggagacagctttaaactaaacttgatttaacagtagcattcctaaacgtgaggttaacatcattctcaaagagttgaccaaggattcatttgataaattcggtttttcggaaatagatgattctggtgattcagacaattctgatattag

SEQ ID NO: 956620 - DNA, 600 bp, Homo sapiens
ttgccttatttgaacatggttcaaacagttggccacatttgattggccaaaacttggtgattggcacaagagtagacgatagtctgtttatactttcatttagtctagagtttgcgatgtacagagaaacgtttaggccaaacttaaaatatgtaaggagggcagggcgcagtggctcacacctctaatcccagcactttgggagcgcaagtcgggcggatcacgaggtcaggagatggcggccatcgtggctaacacggtgaaaccccatctctactaaaaatataaaaaaaatagcgtgcgcctgtagtcccagctactcaggaagctgaggcaggagaatcgcttgaacctgggaggcagaagttgcagtgagcagagatggtgccactgcattccagcctgggcgacagaacgagactctgtctcaaaaaaaaaaaaaaaaaggaaggagacagctttaaactaaacttgatttaacagtagcattcytaaacgtgaggttaacatcattctcaaagagttgaccaaggattcatttgataaattcggtttttcggaaatagatgattctggtgattcagacaattctgatattag

SEQ ID NO: 956621 - DNA, 457 bp, Homo sapiens
gctgtttctcatagtttgaattctcccggaaacagagcctgaaatggaggytagtgtgcgtgatgtttattaggggatgcgctttgtattaacatctacatagacaaggggaagaaagcaatgtttaacagaggaagaagatgacctgcaaacaacttactgtatctttagccgacctgccatggagcactggaactaaaatgtctttcagagtcatccttcatttagttaaaatggccaagtctttctttatgcccgattaccatcatttattgaatgtgggtgtccttgatggtaggttaccacaggtgcagtaaatatctgtaactgacacaacttttgaaagtgctcacatgggaaaactttttgttaacaagatttccaaccacaaggcaacatgttttttgaagaagaatatggacgatatattcctatgtccaccataccgtatgacttc

SEQ ID NO: 956622 - DNA, 457 bp, Homo sapiens
gctgtttctcatagtttgaattctcccggaaacagagcctgaaatggaggctagtgtgcgtgatgtttattaggggatgcgctttgtattaacatctacatagacaaggggaagaaagcaatgtttarcagaggaagaagatgacctgcaaacaacttactgtatctttagccgacctgccatggagcactggaactaaaatgtctttcagagtcatccttcatttagttaaaatggccaagtctttctttatgcccgattaccatcatttattgaatgtgggtgtccttgatggtaggttaccacaggtgcagtaaatatctgtaactgacacaacttttgaaagtgctcacatgggaaaactttttgttaacaagatttccaaccacaaggcaacatgttttttgaagaagaatatggacgatatattcctatgtccaccataccgtatgacttc

SEQ ID NO: 956623 - DNA, 596 bp, Homo sapiens
aattttaatgtcattctctttcagaacatgtatgtccccatgtagtttattaatcaatacagggatttcaaaaaaaaatgatgggtgacaagagtaaggaaaggatatattcttcaggattcttcagagaaccagaaccaataggatacatatggatgcatataagaagatttttattgtggaaattgactcacacaattatggaagctgtgaagttccctgatatgacatctgcaagctggagaatcaggaaagctggtggtataattgagtctggttctgaatacctgagaaccagggaagccaacaagaaaaatcacaatatgaggccaaaggcctgaaaaatagggaagtgaggatatcactggtataagtcctagagtctgaaagcccaagtaccaggggtgctgatgtccaagggcaggagaagatagatgctccagctcaaggagacagagagattaagaactcgcccttcttccacttttttggttctacttgagcccttcataaattggatgatgtctgagttcactggtgaaggcagatcttcctcagtgtatggatwcaaaagctaatctcttctggaagcactc

SEQ ID NO: 956624 - DNA, 560 bp, Homo sapiens
aattcccactcttttctcttctctgctttctataactatgaaaacmaataagaaaacctgattactttcttctttggtgccaattagaatctctgtcctatgcagacaccagatcagccatgggaaccctcactgtgctctcatactccaaccacaacaacagacaatgccaattcttgtctttcaacccagttttagaccttgctctttcgacccagttttagacctgcttgttagctctcttgctcttctagaaagccttattatttgagcgtaaacatttacataccctgttggcatatgtgtggcacctcagcaactgcggtggattttatatggggaatcccatcttgcctccatatagagaccacaagacaactgccacaaagcagtgtgtgcaggtgatgatgatcagtactgatagggtgtttgtcttatcttgctttggcttcctaaatggtgtgtaaccttctgtctgcatactttttttttttctcttttaagttggagtctcgctctctcacccatgctggagtgcaatggtgcaatcttggctcact

SEQ ID NO: 956625 - DNA, 695 bp, Homo sapiens
gcgcccaatctgccagtggcagagaccagccctgagmccccgatacagcagcatttcccgggggcatcaacctgatggcaagttgattacattagactgcttccatcgtgaaaggaacagtgtttgttcttgctggaatagacacactcactgttaatatatttgccttccctgcatgtaatgcttttgtattcattgatttacagaatggcttatccaccctcatggtattctacacaacattgcttctgatcaaggaactcacttcatagcaaaactatagtagtgggctcatgctcagggatttaactgatcttatgttccccatgatttttaggtagctggcttgatagaatgatgagatggcctattgaagactcatttatagtaacagctaggtacaataccttacaagacaaggcaagattctacaacagaatatatgtgctctaaatcagccttaaatatatggtactctttctctcacagcaggattcatgggcccaggaatcaaggagtagaaatgggagttgcaccatccactattacccctgaagactgactagcaaaatttgtgcttactgtgcccacaacttaatgctctgctggcctggaggtcttagttccaaagggagggctactgccaccaggaaacacaataattgatccgttgaaatggaagttaagacttccac

SEQ ID NO: 956626 - DNA, 555 bp, Homo sapiens
gtttggtagtttatgtgtattaaacgcatttttgacttagaatattttcaatttacaatgggtttatcrgaacatatataatctttgtttttttctctcttatccccataggtaacataagatctattaactttatagtatagtatttaagtattgttaaattgacataatagtgtttaagttatgagatatatcagatatgggatatcaagaggaagagtaactatcactcaaggactttgcattcttttgggggaacgagttattccattttcagttgtacataagacagttggatcgtgttaggtggaagtatgacattgttattgtatttatttgtaggttaagtatgctttaaggagattcatatggttgccaagctgaccaggagtggacttgtgatggttaatcttatgtgccaactaggcttggacacagtgcctagacatttgatcaaatattattctaaatgtttatgtgaatatgtttttgaatgaaatcaacatttaaattggtggactttgagtaaagcaaaatgccctccataatgtggat

SEQ ID NO: 956627 - DNA, 555 bp, Homo sapiens
gtttggtagtttatgtgtattaaacgcatttttgacttagaatattttcaatttacaatgggtttatcggaacatatataatctttgttttyttctctcttatccccataggtaacataagatctattaactttatagtatagtatttaagtattgttaaattgacataatagtgtttaagttatgagatatatcagatatgggatatcaagaggaagagtaactatcactcaaggactttgcattcttttgggggaacgagttattccattttcagttgtacataagacagttggatcgtgttaggtggaagtatgacattgttattgtatttatttgtaggttaagtatgctttaaggagattcatatggttgccaagctgaccaggagtggacttgtgatggttaatcttatgtgccaactaggcttggacacagtgcctagacatttgatcaaatattattctaaatgtttatgtgaatatgtttttgaatgaaatcaacatttaaattggtggactttgagtaaagcaaaatgccctccataatgtggat

SEQ ID NO: 956628 - DNA, 619 bp, Homo sapiens
acttagaaaatgagttatttctactcaatagaaaagaaatattgtggaaaaagtatgcatctgaaatgagcatgaggccttctacattcattcagcacaattttrgacctttgattttgctcagggctctctgtaataccaatctgtctcagtgcctggcgagtttcagatccttttctgtttatctcatgtatcttgttctgagctcatccctaagacatcacaagagatattgatttcttgacttccggacacatagtgttccttacaacatgcctgtcctcatcctctgaaattttctcctctggtccttttgagcaaccatccactgacccaattgaatcccccatgaccctcctatatcaaactgcataagggtgtagaacaggacggtcacaatgtaccatggagattttaaatcctttgtaaaatatagaaaacagtaaccaaataaaccccaaataaagcagatcaacagttttttaggtaaagcaacctaaaaactaacctgtctacaaaaggacaagagtaaagttatcagaggcatttgaaccaaagtgactccattttgagtgagggctaggaaaatgaggccgagacctgctgggctgtattccca

SEQ ID NO: 956629 - DNA, 634 bp, Homo sapiens
tcctggtggaagcattcctccctctggaactaagacctttaggccagtaggccacgtggttgcaggaacaggaagcaaacattttgctactgggttactaaggataatagtgagaggtgccaattctatttccaccccttgattcttgaactcatgaatcttaactatgggagaagcagcacaatatattggacaccaattcagaggatatacagccttctaggaagccttgcccaagccctgcaaggtattattacctattgtcactgatgctgtaactgagtcttcaaaaggcactgttctatttagccagctacttcaggatagtagggtacgtggtaagaccagcagggtccatatacctgggcccattgccgcatgtctcttgctatgaagtgagttccttcatcagaagcaatgctgtatggaacaccatgatggtgcataaggcattctataaatctatggatagtagttttggcagaagcattgcaagcattgaaggcaagtctgtgtctagactaagtattccggtaagaaaaaatggtcctccttccacgatagaagcagtccaatgtaatcaatctgcaccaggtagctggctgrtcaccctagggaatggtagacttagtgt

SEQ ID NO: 956630 - DNA, 456 bp, Homo sapiens
ctcctttaaactggttgaattcatattgtttagacaaaatgtgattgcattagtgattagttattgattaatcatcttataaagattaaattatttgatttctttaattagttgattttttaaaaattggcagtgaaatccttgaaaaacattagacctatgtaaatagagcctgagtaaatactcacataatatttaaccaatatttggacacactaccaaggcatcttgttaaggtattgaaataatgactgaattctccaaccactgaaaaaaatgagtgatggactaattatgtaaaaatgtcttttatcctgcatgtgattaaattggtctgttatttgaatgaaggaacaaacctttctggtygtactatccaaatcattatcatgcaggcaccatttctgttatttaaatgtaattttgtcaactgtagacatcattgttgcttctcca

SEQ ID NO: 956631 - DNA, 599 bp, Homo sapiens
tagcttatctttttagcctctyagtggcgtttttcacagagtgaaagtgtttaattttgatgaaatatggtttatgagtttgtttcttgttggactaatgcttttgatataatgccaaaggacactttggctaattgaggtgataaagattttctccaattttttgaaatgttctatagttttacactttgatttaggtccatgatttttttaagttcgattttctgtgaggtataaggtttaagctgaggttcattttttatgtatgtatgtacaatttgtccaatcgtttgtggaaatgatgatcttttcacgatttgattgcctttccacttttgtaaaagaaatcagttggctcaagggaatgaaaagacaaaccacaaattaggagaaaatatttgcaaaaatatacctgataaaggactgtttcccataatatacaaataacttaaaattcaatgataagaaaaaataaagtcaataaagaatatattgatggaaaatgaacagaggaaaagatgttttgtatcatgtatcatttgggaattgcaaattaaaaccatgagatacggctctacatctgttccctgtcactatag

SEQ ID NO: 956632 - DNA, 579 bp, Homo sapiens
tgaagttgaagccagtgctcactgcacattctgaaaacttaaggatccttaagaactgtgctaaatctactgtgcctatgtgcaacaaagcccttatggcagcatgtctgtttacartatcatttactgaatatttgaagcctactactgagaactactgctcaggaaaaaagatacttttcaaaatagtactgctctttgacaatggacctggtcacccaagagctctgatggaggtgtgcaaggagatgaacgctgtgttcatgcctgctaacacaacacccgttctgtactccatggatcacagagtaattttgactttcaagtcttattatttgagaaataaattttgtaaggctatagctgccacacatagttattcctgtgatggatccgggcaaagtaaattgaaaacctagaaaagagtcaccattctagatgtcactaagaacatttgtgattcatgggaggaggttaaattatcaacattaatagaagtttgaaagaaatttattccagccctcatggatgactttgatgggttcaagactttggtagaggaagtaactgcaggtatag

SEQ ID NO: 956633 - DNA, 584 bp, Homo sapiens
gttgcacagaagaatccacatggggagtgaagtgtagcaggtggcggtaagccccactctgctcccacacacttggcaaggcaggtctcacatcagcagtgttctgctagcagcagcttgctgggttccaggcagcctgcagtcagaacttcagattgccccaggccataagctttcctgaccaagacagaaactgggctttcaggccacattcatgaagcagaggccctcagcttctgtgcctgtggctacagcacacttcccagttacccctcagttctggccgatggggttcatctccgctgaagattatatcgcaaatctcagttgggagcttctctcaaaatgtgactgccacctgagttagctggcagacttctgcgatcttccctgtgagatagggtgaggaatggcttccctctgtccctgctggggcctgggagaacatgcaaagctgtccaaatgctgctccttctcatatgttccccaccacccaytaaatcagttccaattctagatagagttaaggcctccccccgtggcctggattgctgggatcttccatggcagtgtttgtcatggtg

SEQ ID NO: 956634 - DNA, 449 bp, Homo sapiens
tatgggaaaatacacaatcacttttaaaagttatcaaacaaaaattaagttgaaaaaagggttaaccagtttccaacttccgtatatagckagccagttatcccaacatcatttattaaatagggagtccttttcccattgattgtttttgtcaattttgttgaagatcagatgattgtaggtgtatagcattatttctgaattctctattctgttctgttggtctatgtgtctgtctgtttttgtatcagtatcatactattttggttactgtattcctgtgatacagtttgaaggtgggtaatgtgatgcctccagctttgttccttttgcttaggattcaattggctattcaggctccctttgggtttcatatgaattctaaaatactttttttctagctctgtgaataaagtcattggtagtctgatagagcaaattcctgaatc

SEQ ID NO: 956635 - DNA, 449 bp, Homo sapiens
tatgggaaaatacacaatcacttttaaaagttatcaaacaaaaattaagttgaaaaaagggttaaccagtttccaacttccgtatatagctagccagttatcccaacatcatttattaaatagggagtccttttcccattgattgtttttgtcaattttgttgaagatcagatgattgtaggtgtatagcattatttctgaattctctattctgttctgttggtctatgtgtctgtctgtttttgtatcagtatcatactattttggttactgtattcctgtgatacagtttgaaggtgggtaatgtgatgcctccagctttgttccttttgcttaggattcaattggctattcaggctccctttgggtttcatatgaattctaaaatactttttttctagctctgtgaataawgtcattggtagtctgatagagcaaattcctgaatc

SEQ ID NO: 956636 - DNA, 736 bp, Homo sapiens
atgcacacacaaagatccactggcttttaccttggaactctagctataagatagcaatacaaactcaccggtctacaaacatgttcacatggctaaactttgtttgcccaagtaggtcatccagtgaagggcatgaaccaacattttgggtaaagtattctccatgaaagtttgagtttttaaaggcaaaacctcttcagattccaaaggacagcagggccaaacagcaccacagaagaacatcatgtattgaccaggcctactcctgtttacataaaagactggatacatgacattccgtcccactttcattcaacagcaaaatgagacctatggagaggccaaacttctccagattccaaaaataatgaggccaaacagtatttcaaaagaataccagtttatcaaattctggttttccatgactatactaaaacacatacctaaacaatcaccaaaacacaatcccactgctgcagcagcaaacaaatcccaagagtgtccaagcagaaacagggtgctttgctctcttcattagttaggcttgttcaatctgcaaatggaaattctttcagaattccccaaattgagaagagaagataccattgtctggtgcccacaaaagataytcacccatctggacacagacgacaaatttcaaaggctgtttttcctaagcaatcaggaacacagttggggccagcagcggcaggaccagagagagatcaaaacccac

SEQ ID NO: 956637 - DNA, 579 bp, Homo sapiens
ctataactagactaaagtcctggcaggcccctagaggtgaggttgagagtgtgaccaatgaggaggtgtgtgctatactcaaaaagarctgtttatctaatttatatgaacagaaatcaggggaacagttatgagaatgggtattaaaggcatgggataatagcagaaagaacatagagttggatcaggctgaatttattgattttggccctctagttgggactctgtttttaattttgcagctcagggagttaagaaaaggttctcaatagtttatttgcttggtaagctgaaatacggattaaaagatggcccactaggagtgagctggaaatgcctgatatcccttggtttaatgtcaaggaagggacccaaaggcttaggaagattgggatggtggagtggattcgtcactttagacttactcatcccagctgggagggtccagaagacatacccttgaccaaggcatttagaaatagatttatgagggcagcacctgcatctttgaagaggactgtaattgctcttctctgtatgtgagatctaacggtgggaactgcagtcactcaactacag

SEQ ID NO: 956638 - DNA, 620 bp, Homo sapiens
gccagttttgagtggggtccagaacaggagaaagctctgcagcaggtccaggctgctgtgcaagctgctcttccacttgggccatatgacccagcagatccaatgttgcttaaggcttcagtggcagataaggacgctatttgaacatttggcaggcccccataggtgaatcacagaggaggcctcaaggattttggggcaagtccctgccatcttctgcagataactactctccttttgagagacagctcttggcctgttactgggctttggtggaaactgaatgtttgactatgagtcatcaagttaccatgcaacctgaactgcctatcatgaactgggtgctttctgacccatctagccataaagtgggtcatgggcagtagcatcccatcatcaaatggaagtggcctatacgtgatcgggctcgagcaagtcctgaaggcacaagtaagttatataaggaagtggctcaaatgcccatggtctccactcctgccaccctgccttctctcccccagyctgcactgatggcctcatggagagttccctaagatcagttgacagaggaagagaagactagggcctggttcacagatagttctgcttgacatgcaggc

SEQ ID NO: 956639 - DNA, 583 bp, Homo sapiens
aagaacctacattgaaatattggggttgggttcccccgataccctagtaccgtttattaaatasgaagttcattccccactgctcatttttgtcaacttttttgaaaatcagatacgtagttataggtgtatggcttatttctgggctctctagtctgttccattgatctatgtgtctgcttttgtaccatgaggtccatgttgtaccaacaggtccacgttgtaccaacaggaccaagctgttttagttactacagccctgtagtatagtttgaagtcgaggaacgtgatgcctcctgctttgttgattttgtttaggattgccttggatattcaagttcttttctggttccatataaattttaaaatagtttttttctagttctgtaaataatatcattggtagttggataggaatagtattgattttgtaaattgctttggacagtatgaccattttaaccatattaatttcttcctatccatgagcatgaaatgtttttccatttgtttgtttcatctctgattttttaagcaatgtctggtaattctcattgtactgatctttcaactccctggttag

SEQ ID NO: 956640 - DNA, 725 bp, Homo sapiens
ttttttcaatttacagatgttaaatctatagttttaaaaagcaaacttatttatcaaggtgaggtcttcagaaagtgcctatatgcacaatacaggaaaacatttgaaatcaaaatgattttaatgccctgctgtgtacaatcgccaaaggactcaaaaaaagagagtgtatgctgatttttagcattttattcacaataacttttatactatttttgactttgcacaccagcttcagaaccttttggttgcaaaatacataagaattaatttcagaaattgagggcacaaaatccatctcctacgcagacttatcagagtagcactttagttttccattcaagtcctaaaactctcctttataattggttttattcaaagtcctggtaaaattgcagattgcatctgcctctgttttgcacattctagtcaattactttctttctttatcatttttcagtagtgtatatatgacctctatttcctttctcatttcagcttttattcttcttcccattttcttaatgtctatagaaacagccaggtagaagtttattgcatacattccctctgtcttccatcgacttatctcaacgcttttttttttctatctcctctttgtattcactgtaacatctttcctgatttttttgtttgtttgttttttgagacggagtctcrctctgtcgcccagtctggagtgcagtggcaccatctcggcttac

SEQ ID NO: 956641 - DNA, 636 bp, Homo sapiens; identical to SEQ ID NO: 956092

SEQ ID NO: 956642 - DNA, 753 bp, Homo sapiens; identical to SEQ ID NO: 956093

SEQ ID NO: 956643 - DNA, 610 bp, Homo sapiens
gctgaactgaataagggagcaatgcaaccctatgttgaaggagcgggaggatttacccaatgcgtgctggcagaagratggaagaaactggattcttaggtgctggatcaaggggagtgaaacataaagttggaaaagggagaacttatcaatttgggagcatcctgctgggatctagaatttaatatgctggcaagacccctggaagagacacgctactgggatggctcttagagcctgggaaaagcactgtactacactaagggaagcagaaatgccagaaatgccagaactgccgtggcagacagagaagaaggcctcagagaagtgggcatctagaactcatacacacacaaggctagaaacctcaccaattgattacattgcacacaaaggcacagagggccttccattgtcctaagcaataagaaatgcactagtgagaggggtgctggaagcagtgagaagctcagtggtggttctcccagggctgtagtaggagatgccactgcagaatttggtttattgatataaattgatatgataggacattgaaataacagaggccaggtggcagcactctaccagaagccaggcaggtgcagttaag

SEQ ID NO: 956644 - DNA, 750 bp, Homo sapiens
tgaatgaaggggtcttgaatctagcacgctctgaaccagactctccccccgccgccctccgccctccaccacagtagcagccccatcctccccagcagtgcaaggaagaaacccaagagtccttgactttgaccctccccttacccccagagccaacccatcaccacattctgccaatttgaccgctaaacccctccaacccctgcactctctctgtctccatccccacacctggtcccagccacatcacctctgtcctggacttctgctatgccctcctaaccgactctcttgcttccgggatggtggcccgccactctctcctgcctggccgtcagagcgagcttttcaccctcgcaccgcatcatgtcactttcctgcttgagaccttcggaggtttccttcatttgccaggcagactccgtgcatggtcgccctgtgtggttcagccccagcttgcttctcctgccttgtctcctagccacatggcccacacacacagcgctgcatccctccctgtgctcagtccacagccttcgggcttgctgtgctctctctgcctgtgggggctgtgcacatgctgctccctcttccagagtgttttccctgctcctctttgctgaacctaagtgtcttcagatcccagagcaagatcacctccccatgggcacctgytgttccctgacctctgccatccagtcttatcctatcgatcctatctgcctaccacgttctacatcctggggcctg

SEQ ID NO: 956645 - DNA, 710 bp, Homo sapiens
caaaactagttgggccaaatgagaggctggcagaaaactcaaaaggaaaatatggaaaacgagatgtccatagggaactttgaaaaatctaaaaggccrtgagcatggctaggatttcatgcatgcccaggaaatatctgagaaaaccctaatctcttaccggtgtctaaccttgaggctttgtacaagcaggaaatgaaggcaaaggcagaattgtaagccactgaacactgaagatataccccgacacacacacacagagcccctcaacttaaaatgagagctatactggttcaaggcatttgaggaaacctctgtctaataatcatatgaacattaagttagtcaagtagaagctttagtggccacacacaacaaagaataaaacttcacggaataagcccaggaaagtcactagaaaaacaaacaacaacaacaataaaaaacaacaacaaaacttgaagagcaaggaagaatctgacttccagagtggctgcattctattatttttaatgtccagtattcacaaaaaagtataagatatgaaaataaataggaaaatatagcctatatataggaaaaacagtcaacagaaactatccctgaataagcccagatattgaacttgctagacaaatactttaaacaaactattataaatatgttcaaagaactaaaagaaactgtatccaaagacttagagaaacatc

SEQ ID NO: 956646 - DNA, 715 bp, Homo sapiens
gcctgattcctgccacacctctttattcaggcagtggtcaacagtttttaatgccctcttcaaaatgacagaaataagggataaggctgtgtgcctcactgaggtgctgtccaactgggaagaaaaagagttaaatgcacacatgtctctaggatacacagatttgctaagctatgggcttggctggcatttgcccctcctcaggtcactcacagggaaagctgcatgaaactgctggtctctacgctctgagaagaggcgacctgggtacctcgccctcctgacatcctctgggtctgacttcagcaattgccaggaaatgaccactaatggtggcatccagcagtagtttcatttttatcatctgctctttggtaagccttgagacaaccactcagctaccatgaaagttctccattaacaacagatctcaccagaacccactctgccactattttttttttgagtcagggtctcactctgtcgcccaggctggagtgcaatggtgcgatcatagctcaccgcagcctcaagctcctgggctcaggcaatcctcccgcctcatcctcccaagtagccaggactayaggcacctactgcttctggctttctttttttttttaagagatgagacttagtatgttgcccaggccggcctcaaccttctggcctcaagccaatcctcctgcctcagcctcccaaagcactgggatta

SEQ ID NO: 956647 - DNA, 651 bp, Homo sapiens
tagttgtgctcaataaatgacaactgtgacagtgtggatgcagtgtgsttacaccaggaatatgtacagtgagacaggtattggtcaggacacagtgggagcaggagctaggtaagcagaaaggggctggtggagtgtgtgagtctgggcaggaaacagattagagtccagagaagcccaatcaaggcaggaagccttgggcatcaaccagagactgagccaggcaggctgagacaagaccctggagaccaggcagttaataagaggctttgagagcagggttgaaaaccccagatcatgggtagaggttctttgctttggggctgatttcattttggctgctgggtcaattctgtttccctttttaaaaaatctttgttgagacataatttgcatgccataaaatttactcatttaaaatatgcaattcaatggggttagtatattcagagttgggcacctatcaccacaatccaagttgagaatattttcatcacccccgcaaaaactgcatacccattagcaatcactacccatttccccttcccaccagcacctggcaaccactaatctattttctgtctccatagatttgcctgttctggacatctcatatcaatggaatcacataatatgtggtgttttgtgact

SEQ ID NO: 956648 - DNA, 685 bp, Homo sapiens
tacatttccaccaggagactacgagggtttctatttctcctcatcctcaccaacccttgtaattatctgtggttttgattctagcccatcctggcaagtgtgaggtggtaactcaytgtaattttgatttgcatttccctaagggctaataatattgaacatcttttcatgtatttattggctatgtgtttttcttctttggagaatgtctacttaaaggctttatccatttctaattgacttatttgtctttttcttattgagttgtaagagttctttatatattctggataccagttctttctcacataacatgatttgccaacattctctcctattctgtgggtcatcttttcactttcttgatagtgcagcacaaaaatctaagttgaggtagtccactttatctattttgtccttggtctattcctttggtgtcatgtctaagaaatcattgcctaatccaaggttaaggatttttaagacttttatagtcttggctcttatatttagcactctagtcctttttgaattaaattttgtgtatggtgtgatggagggggtccaatttcattcttttgcatgtggatatccttcgtcccaacaccatttgttaatgtctgtttcagaggtatgtgaaccagagcaactccatcttgaatgggagctgggtaaaatgaggctg

SEQ ID NO: 956649 - DNA, 433 bp, Homo sapiens
aggctggtcttgaactcctgacctcaagtartctgcccacctcggcctcccaaagttctgggattgcaggcatgagccaacgtgcccagacattttttaaaacttcttgacttttttttttttttttttgagacagagttttgctcttgttgcccaggctggagtgcagtagtgcaacctcagctcaccgcaacctctgcatccagggttcaagaagttctcctgcctcagcctcctgagtagccgggattacaggcatgcaccaccacgcccaactaattttgtatttttagtaaagacaaggtttctccatgttggtcaaggcagtcgcaaactcccgacctcaggtcgtccacctgcctcagcctcccaaagtattgggattacaggcgtgagccatcgtgcccggcataacactttgcttaaaaaaata

SEQ ID NO: 956650 - DNA, 548 bp, Homo sapiens
atttttcaaagatgctctttataagtttgagggaggtcacttctatccctagtttgctgagatttttttttttttaatcaggaatggctrtggattttgttaaatgctttcatttgtgtttgttgaaatgatcatatggtgtttcttttttagtttgttaatatgttttaatttgaattacattttttttcaaatgttaagccaatcttgcattcttgggataaagcctgcttggtcatggtatattgtattttttaatatatgatagtagtgaatttgctaaaattttgtttagaattttaaagtgtgtattcttgagggacattcatctgatttcttgtaatgtctttggtttgggtatagggtaatgctggcttcacagaacaaattgagatgtgtcttccttttttctcggtgaatttgtatcagaattggtatttttgtcagatgagtaggttgcgaaaattttctcccattttgtaggttgcctgttcactctgatggtagtttcttttgctgtgcagaagctctttagtttaattagatcc

SEQ ID NO: 956651 - DNA, 667 bp, Homo sapiens
ggctgcaggcctggacatcccttgttagttccctcmggactgccccaattcaccagctcttcaacaaaacccccacagtgttaggacctgaccactctgaccaagccccctccccttgctctctatccctgtttcagtctcttcatcgcatttatcactatccgaaatgatcttgttcacttgcctttttcctattgtctatctccccctcaaccactggatcctaagctccatgaaagcaaggagcttgaaatgttccctgctttatcctctgggcctaaaccagtggctggaacacagtaagcactcaatagacagcaaagcctgaatgaaccaatgctacattgtctctgctcaaaatatcaccatatcagtaagaccttccctgatcatcttatggaaaatagcaatctcccctccactcccagatctccactccctcctcctgccctccaagtcttattttttcctatagcatcattactttctgatacatttgatatttctttattgcttgtttcccttccaaaaaatgtcaaccctggaggcagaaatgctattttatttactgatgcagcctcagagcctaggacagtacctatcccgtagcgaagtctcaataaatatttgttaaaatgaatagctagcgaagtgggcaaactttcat

SEQ ID NO: 956652 - DNA, 543 bp, Homo sapiens
tatttatttagagatggtatctcgctctgtcacccaggctggagtgcaktggcgtgatcttggctcactgcaacctccacctcccaggctcaagcaatgctcctgcctcagcctcccgagtagctgggactacaggcacacgccaccatgcccagctaatttttgtatttttagtagagacggggtttcaccatattggccaggctggtcttgaactcctaatctcaggtgatccatctgccttgccctcccaaactgctgggattacaggcgtgagccactgtgcccggcctacttatttatttttataatttcccctttaaatacaaatttcacgaggtcaggaagttttatgtttgttcactgctgtatttccagcatctaaaacatgtcaggcacatagcaggcattcaagataaatatttatcaaatgcaagcatgagtgtaaaatgtatgagaaaaaccaatacatccacatttattatttttgtaatgagacaagaccaacaagtgattactaatgggattttcgcctcacatttt

SEQ ID NO: 956653 - DNA, 844 bp, Homo sapiens
agctgggactacaggcatgtgccactacacctggctaatttttgtattttttgtagagatggggtttcactgtgttgctggatcaaatgctgtaaagggttgaattatgtactcccaaaaagatacttgaagtcctaaccaccagtacctcagcatgtaatgttatttggaaataaggagggtctttacagatgtaatcaacttaaaatgtcacaccctaaagcagtatgacttgtgtccttctaaaacagggagatgtggacacacgtagacatgtatggagggaggatgttgtggacacccagggagaaggtggcaccaacaagccaggtacgccaaaagctgggagagcctggaacagatccttcccttgtggaaggagccaactcagccaagaccttgatatcggttttgttttgttttgtttctcaagacggagtctggctctgttgcccatgctggagtgcaatggtgtgatctcatctcactgcaacctccaccctccaggttcaagcaattctcctgcctcagccttctgagtagctgggattacaggcacctgccaccacacctgggtagttttttgtatttttagtagagacagggtttcaccatgttggccaggctggtctccaactcctgacctcaagtgatctgcctgccttggcctcccaaagtggtgggattacaggcatgatccattgtgcctgscaagaccttgattttggacttcccacctgcagaactgggagacagcatgtttctttgtctaagccactaagtttgtggtgctttgttacggcagtcctaagaaaccaattctgtttaggattttgaggaactg

SEQ ID NO: 956654 - DNA, 622 bp, Homo sapiens
gcgctcatggcaaggcagaatctcccgccttgccmcacacctgctgaatcaaaatctgcgtttccgctgggcgcggtggctcatgcctgtaatcccagcactttgggaggctgaggcaggcagataacctgaggtcaggagttcaagaccagcccgggaaacatggtgaaacaccaactctactaaaaatacaaaaattagctgggcatggtggctcactcctgtaatcccagctactcgggaggctcaggcacaagaaccgcttgaacccaggaggcagaggttgcaggaagaggagattgcacccctgcactgcagcctgggcgacagagcgagactctgcctcaaaaaaaaaaaaaaaaaaaaaaaaaaatctgcatttcaacagaatccccagctccctcctacgcacctttaagtttaagaagtggtagtcaaagccaagtgttctcaaggtgtggctggagaccagtagctgtcacatcatctgggaacctagaaatgcaaactcaggccaggtgcgatggctcacgcctgtaatcccagcactttgggaagccgaggcgggtggatcacatgaggtcaggagttggggaccagcctggccaacatggcgaaaccc

SEQ ID NO: 956655 - DNA, 622 bp, Homo sapiens
gcgctcatggcaaggcagaatctcccgccttgccccacacctgctgaatcaaaatctgcgtttccgctgggcgcggtggctcaygcctgtaatcccagcactttgggaggctgaggcaggcagataacctgaggtcaggagttcaagaccagcccgggaaacatggtgaaacaccaactctactaaaaatacaaaaattagctgggcatggtggctcactcctgtaatcccagctactcgggaggctcaggcacaagaaccgcttgaacccaggaggcagaggttgcaggaagaggagattgcacccctgcactgcagcctgggcgacagagcgagactctgcctcaaaaaaaaaaaaaaaaaaaaaaaaaaatctgcatttcaacagaatccccagctccctcctacgcacctttaagtttaagaagtggtagtcaaagccaagtgttctcaaggtgtggctggagaccagtagctgtcacatcatctgggaacctagaaatgcaaactcaggccaggtgcgatggctcacgcctgtaatcccagcactttgggaagccgaggcgggtggatcacatgaggtcaggagttggggaccagcctggccaacatggcgaaaccc

SEQ ID NO: 956656 - DNA, 680 bp, Homo sapiens
atttgcctgtggagggcatttcatatcaatggaatcatacaatgtctggtcttgtgtgtctggcgtcttccactaagcgtgtgttttcagggttcatccawgttgcggcgtatcagtatttggttcctttccattgcctcagcgttcctttgtggatagaccatattttgtggatggatgcttgtcttagttaattcaggctgctccaataaaatagtgtaaactaggtatttctgttataagtgacagtagtgtattcctatagttctggaggctgagaagttcaagatcaaggtgctggcagattcggtgtctggtggggcctgcttgctgtatcctcacagtggaaagaacagccaggctcccttgggtctctttaatttagtttatttgtttgagacagggtctcattctgttgcccagactggagtgcagtggcatgatcatggctcactgcagcctcaacctcccaaactcaagtgatcctcccaactcagactcctgagtacctgggactataggcatgtgccactacaccctgctaatttttgtattgtttgtagagatggggtttcaccatgttgctcaggttagtctcaaactcctggactcaagtgatccacctgctttggcctcccaggatttcagatgtgagccactccgttcagctggtgtccctt

SEQ ID NO: 956657 - DNA, 588 bp, Homo sapiens
gtcctccagaaccccaagctttgcagttggacttgaacccctcatgcgcttttgattcctgattaaataacctgattcgagttgttgagatctttagtttacatcaaataattcttctttctattgctccattcacttctgcacattgccttaggtaccgattcattttctctacgacccccgctgcttacatgagttctaagatcatccacaggtgtgtgcctgtcggagggctcggagaacacgggacagcaggaagcagtcttttttttttttttttttgagatagagtctcgctctgttgcccaggctggagtgcagtggcgcaatcttggctcacttctacctctgcctcctgggccccagttcaagcaattctccttcctcagcctcccaagtagctgggattacaggcatgcaccaccatgcccaaataatttttgtatttttagtagagacagagtttctccatgttggccaggctggtcttgaactcyggaccttgtgatccacccgcctcggcctcccaaagtgctggggttacaggtgtgagccaccgcgcccagccaggatgcaatcttattggtg

SEQ ID NO: 956658 - DNA, 630 bp, Homo sapiens
ccgaaccctgtttaagagatttttatccaggtttcattatgtcattggccattagtgattgaattcaacctccagcccctttcccttcccgcaagasgagtagggacatgttggagctgaatgaaagttacaaccctctgatcacatggtgtgttgcaccagccccaccctgaatccatcctagagcccgcaattagccacctcattagtagaaactgtgatttgactaagggagtcattatgaataacaaaaacactcctattgcctaggaaattccaaggggtttaggagttctgtgtcaggaactggggacaaagaccaaatagattttttataccaaactccctaaaccaataacccagtttaatcgtgagaaaaacatcagacaaatcccagcagagggacattgtacaaaatagccaacctaaaatcggtcaaggttgtgaatgtggtcagaatcaaaatggtggagtcatttgtgttaaaagagagagaaaaaaaaaatgacaaatagagctggggaaagccatgaagaggattcttgttcctaaatgcgtgatgtcacaaatgctcataaaagatcaacactgtccacagaggccatgtcagccttcccaaaagaagattcc

SEQ ID NO: 956659 - DNA, 668 bp, Homo sapiens
tcttcattaaggggaaagaagtctgtcttgtgcatacactggggactggccttggcccatcacattactgtcctgttgcttctttcattccacaaatgttatttgttcaggtggtcaccaggtagacaatagaaggggaggggtggctcgcaaggatggtggattagtttcctgcagccgcagtaacaaattaccacaaacttggaggcttagaacaataaaaaatcattccttcccatttctggaggccagaagtctgaaatcagggtgtcctcagggctgtgcatactctgaagcctctagaggaaggtcctttcttgcttcttctggcttctcagggagtagtgttagcacgtaggctggtcatttggaacaaaatgcaagctgactgcccagccgagccagcagggtcaaagagctcagtctaaaaattaaactattgaaagcactacaagaaaacaagggagcattattttatattggttttataggaatagaggaggcctttccaagtgtaacgtggtggccccaggcattccttkgctggtggctgcatcactccagtctctgcctccatcttcacgtgaccttcttctgtgtgtctcttataagggcaattgtcattggatttaggggccaccaggataatccaggatgatctcatcttg

SEQ ID NO: 956660 - DNA, 768 bp, Homo sapiens
ttatcctaggtcctgaaaagtggaagagggagacagcagaagagagggamccagggagatagtagcataagaaggacttagcccaacgttgctggttttttttttttttttttttttttttttttttttttttgacagacagggtcttgctgtggcccaggctagagtttggtggtgcaattagggctcacggcagccccttgacctcccaggctcaagtgatactcctgcctcagccttctgagtagctgggaccacaggtgtgcaccaccatagtcagctagttttgttatgtattatttatttatttatttctatatttattgcagagatgaggtattactctgttgcccaggctggtctcagactcctcagtgcaagtgaatcctcctcccttggcctccccaaatgctgggattacagaggtgagacatcatgcctggccatggttgctggttttgaagatgtgggaaggggaccatgagccaaggagtgcaggtggcctgtagaatctgggaaaggaaaggaagtggattcccccagagcttccagaaaggaacacagccctgatgacaccttggctttagcccagtgagactcctgttggacttctgacctctaggatcttaagtcaatgcatttgtgatattagtccaatcaattttcagtaatttgttacggcagcaaaggtaaacaaaacaggagtaggcagattcccgttcaattcaatttatacacactgaacacctgctatgtgccagatcctgt

SEQ ID NO: 956661 - DNA, 758 bp, Homo sapiens
ctgacgcttgacagagacacaggaaaggaatatgcaattctccaattctctattttttttttttgttttaggtagattctcamcctgtcacccagtctagagtgcaatggtgtgatcttggctgactgcaatctctgcctcctacattcaagtgatcctcccacctcagcctcccaagtagctgggacaacaagtgtgcaccaccatgcctggttaatttttgtatttttaggagagaggaggtttcacgtgttggccagggtggtcttgaattcctgacctcaggtgagccacctgcctcagcctcccaaagagctaggattacaggtgtgagccaccatggccggccaggaatatccagttctttaatagtgtttcttttttaaaacattggcattcagattaaatatctgtatgccattgtttaatacaccgcaaaaacaagtcaggtgagagatgaaacctagagagaactagacaacaagttacccagacttgtaagctctgtgcatgattaggtagcttcaaatacaaagctttgaagatgtgcaggggtttcagaggtggagggactcaggcccttctggtagggccacgtgtttgcattgtcttattggactgttacaggagctgtctcttcaaaggcacttgctcctagcaaacttatgcctttccaaagtctcctctaaaaatgagtagaggacactttgttttacttttactgaagtgaaaacaccaaggcatgctttaggggtctc

SEQ ID NO: 956662 - DNA, 593 bp, Homo sapiens
agactctgtctcaaaaaaaaaaaaaaaagtcacaaatactctttraaagtgtgcagagtcattcatatccaaaccatcaaggcctgcccaacagcctggtgacttgaaatcttgacgtgtacacagagtctaaacctcggtctttagattgcctccttactggacctctttacttattaagattcatccttgtggaggaagtgaggtcatggatgttcacatctatctttcccaggaagaaaaggaagcttcaagagctgggaaatgctatgcaccactgtgcaggttctgagcagcacagagccacctgtggggtgggcgggtaggtgagtagtggacatctgaccaccaggcgctgtgcaggactacctccttgcagagcaggtggggccttccaagttgcctactcatccaacctgcacagtaagccttatgggagcgtcatggggctacgcctacttcaaagagcaacttagctaaagggaaagagaatttgcacttgctctcttccactctagcagacttgcacttgtcgctatttatttgtgaacacagactcattttagattgacttaaaaataaaaaaaagtgca

SEQ ID NO: 956663 - DNA, 529 bp, Homo sapiens
attcatatccaaaccatcaaggcctgcccaacagcctggtgacttgaaatcttgacgtgtacacagagtctaaacctcggtctttagattgcctccttactggacctctttacttattaagattcatccttgtggaggaagtgaggtcatggatgttcacatctatctttcccaggaagaaaaggaagcttcaagagctgggaaatgctatgcaccactgtgcaggttctgagcagcacagagccacctgtggggtgggcgggtaggtgagtagtggacatctgaccaccaggcgctgtgcaggactacctccttgcagagcaggtggggccttccaagttgcctactcatccaacctgcacagtaagccttatgggagcgtcatggggctacgcctacttcaaagagcaacttarctaaagggaaagagaatttgcacttgctctcttccactctagcagacttgcacttgtcgctatttatttgtgaacacagactcattttagattgacttaaaaataaaaaaaag

SEQ ID NO: 956664 - DNA, 766 bp, Homo sapiens
tgtcagactggatttggagaatcaatatctctgcttcctcatcccttgggtgggaaaatactgagagcttatttgacacactgkcctgggtcctcagcaggactgagccacttgtgcccgtggtgacagcttgctcattaatgcacctagtattttcttctccccttccctgtctcactttccttctctaccaggctttctgggatcacctcccaagtattctacttatactcaaatccttgtctcagagtctgctttgagaaaaacccaatccaatatagctttcttgctgtttcctaaacatgccaagtatactgcagggcctatgcactgacttttaactctacccctaatgcttttcttccatatagctgaatggctcactcccatgctcactcaggtctccactcaaatgttactttatccaaggccttccccagcaagcacactttccctcattcttattctcattcttttgttttgttttgttttgttttttgtgagacacagtttcgcttttgttgcccaggctggagtgcaatggtgcgatcaccactcaccaccacctctgcctcacaggttcaagcaattctcctgcctcagcctcccgagtagctgggattacaggcacgtgccaccaccctcgactaattttgtatttttagtagagacagggtttcagcatgttggccaggatggtctcaatatcttgacctcgtgattcgcccacctctgctggattacaggcatgagccaccgcgcctgg

SEQ ID NO: 956665 - DNA, 579 bp, Homo sapiens
ccaggctataggtgaatttacacttctttttttttttttgagacggagttttgctcttgttgcccaggctggagtgcaatggcrtgatctcagctcacggcaacctccacctcccagggtcaagcgattctcctgcctcagcctcccatgtagctgggattacaggcatgcaccaccacgccgggctaattttgtgtttttagtagagatggggtttctccatgttggtcaggctggtctcaaactcctgacctcaggtgatccgcccaccttggcctccaaaagtgctgagattacaggtgtgagccactgcgcctggccaaattaaacattttctggttgacaactggttgtgtttgtctaaagacctgggatccatagaaaggaaatgctcaggttaagataaaagactgtggagaccagggttcttccaaagtctcacagtggctgcccttagagacaatcaatgacaaatgcttcctgttcagacctttaaaaggtgctaggctcttaatcttttcaggattgtgagggcctggaagaaacaagatctagctgtgttaatagagattctttaca

SEQ ID NO: 956666 - DNA, 611 bp, Homo sapiens
tggcctgggatatggtctatcttggtaagcatgctacatgtacttggaaagaatgtgtatttatttgtcagtagttgggtggagtgtcagtaattgtgaactgggcaagcaggttgatagtggctagtactttgttcctgagtaaggaacatattcttactaacttcctgtctacttgttctatcaattactgagaagaatgtttaattgccaactctaattgctgatttgtctgttccttctttgagatctgtcagcttttcctttatgtatttttggagttctataattaggtacattcacatttagaattgttatatcctcataatacttttcttcctttatcattctgaaatgtccctccctatccctggtaatattccttgttctaaagtctactttgcctgatgttaacatagctatgccagctaatttcatgcctagtatatgcatggcatattttttctcatgtttttaatctttaatctatctgtgtcattatgtggatttaaagtcagtttcttgtagacagcataaatytgggccctgctttcttgtccagtttgacagtctttgtcttttaattgcagtgcttagcccgtttatatgtg

SEQ ID NO: 956667 - DNA, 603 bp, Homo sapiens
acttggccaagacctcctggcggtgtggagctctgaagacacaggagggatgtcctccgagctgttcatgcctagacctacccccaggctccctctagcaatcagctccagtcctgggcctgtctgccttccgggaggagtgggggcccacagagctgcccttcccgcgctgtgtatggactcaaggcactgatggccttcggtgggccactgcataaatggatgtttctgcagtattgaaggccagtcaggcaaaccgtgtgctttcctacgcagtggggaatgtgtcgccctttccttacatcttggagaccaaagccaccatctgcacttgtgggtacattgtggcagtggtcggttagggtggtctttcaaagcagtttgaaatgcagacacttgtgggcgtcccctaaggcaggtgccctttacctggaggccgcattggtcacctagacccgcaaggctcacctgggccggaaggtgtggtcaagcgaggccaagtagcccagaggccacccctaagcacctgtggacatcatgagtccttgctggggtcctcacagagggaagacagcscccagggtaaagcctcaggtgctaagc

SEQ ID NO: 956668 - DNA, 573 bp, Homo sapiens
aacagtgggtttaaaatattcagtaatgtgttattccatttccagagcacaggcaagagtagacgtaacataattcttcagaaccctaggattttcagaatggtcaaagaccaytggcttcagcttaaagtcaccagtgacatttgcccctaacaagagagccagcttgccctttgaaactaagcactgagttctctctaggtatgaaagtcctagatgtcatctccttccaaaggaagtcttttgtctatattgaaaatctgctttttcgtctcgctgccttcatcaatgatcttagctagacctggataacctggtgttgcttttctgttaggtagcacttgctgcttcaccttgtactttcgtgttatggggacagcttctttccttaaacctcatgaaccagcctctgctgcttccaactttttttttttttttttttttttttttgagatggattttcactcttgttgcccaagctggagagcaatggcgtgatctcggctcactgcaacctccacctcccgggttcaagcgattctcctgcctcagcctccgtagtagctgggagta

SEQ ID NO: 956669 - DNA, 596 bp, Homo sapiens; identical to SEQ ID NO: 956381

SEQ ID NO: 956670 - DNA, 553 bp, Homo sapiens
ttccatcatatggctataccacattctatgtatccattcttctgttgatggacttttgggttgtttctaccctttggctgttgtaartggtgctgctatgaacattggtgtacaagctttggcttgaatacctgctttcatttctttttggtgtatccccagaagtgaaattgctagatcatatagtaattctatatttaattttttgagggactgccaaactgttttctacagtggctgtaccactttctgtttccatcagcaacttgtggggattccaatttttcttttcttttcttttctttcttttttttaagatggagtctcgctctgttgcccaggctggagtgcagtggcgcgatcttggctcactgcaagctccgcctcccgggttcacgccattctcctgcctcagcctcccgagtagctgggactacaggcacctgccacgacgcccagctaattttttgtatttttagtagagacagggtttcaccgtgttaggatggtctagatctcctgaccttgtgatctgcccgcctcggcctcccaa

SEQ ID NO: 956671 - DNA, 649 bp, Homo sapiens
ccacccaggagttcctagttgaagtggaggaccagggagtgtgttctaagattgaagagaaagagatgtgatatgctrgtgataaaggaggggttttgaaacagaaaggaaaaatgtaaactgcaaatggagagatagagaaataaacagaatttcaagagatgtgggtgggatggggtggggtggggggaagaaatgaaagtacaggagagaagggtagggtgtccagaagagcagagcgtcatcaacagagagacgcagaggcaaaggctaactgttgatcttttcccaaatccaaaagctgctcattggcatcccaataaatcactctactacaaagcccatacaatggactgtcctttgcattcagcatcaagcagcatttaatgaaatatcacacagctacaactttggagacctaaggatctgaatttaaaatgaacaaaattggcttagcagcagaagacagccagtaaagaatttcgcccatgtctgactcagctaggaaaaggtttagcattctagagttaagcaaatactctggcatttctccttcttttgacattccaagagggggtgtggttgaccccaggcccattcatttccaagggtgtagatctctcagccaagactggccccatctgttgtg

SEQ ID NO: 956672 - DNA, 609 bp, Homo sapiens
ggttcaccgccattctcctgcctcagcctcccgagtggctgggactacaggcacccgccaccgcgcccggctaatttttttttttttggttttttgggtagagagggggtttcaccgtgtkagccaggatggtcttgaactcctgacctcgtgatctgcctgcctcggcctcccaaagtgctgggattacaggtgtgagccactgcgcccggcctgtaaggaacttttgatcagaccccatggctggcctcggtcttccctcagtgaatccctgagaagagtgttggtctcttagctctgcccctagaaagatctaaaataatctcgaatctagaatgacctcatttctacccgtctctgccagagtccagaaatgttcagctgctatctctcttcagcctcaaatccctaaccctggggtgattcactcctgaaacagagtagataatttaatccaggaaaactctctctttctaggaagaagggtttactcgtcaccctctgtgtagtcacaggaaccttgattaatttatgaactgataacaatgtgtatagattgtttttttaaattccacttttagagtattgctactgctgcatatttcttct

SEQ ID NO: 956673 - DNA, 547 bp, Homo sapiens
ctgggactacagccatgtgccaccatacccagctaattttttgatttttgttgttgttgttgtagagatgargtcttgctacgttgcctaggctggtctcaaactcctgggctcaagcaatcctctggcctcagcctcccaaagtgctgggattacaggcatgggccaccatgcccagccacaatagttatcttgagtaatggaccacctggtggtctggccagcagcaaccatgctgcaaatcactgttgaacattccttcctgaagtaggacactccataaccttggtttgatatttagatttccaaaggccagttcctgaaattctttaagtaaaaggcatggttaaacattatgagagcacagaagaatggctatttgctttgtacaactaaagcctcagggttagcaggaatattggtatattgccagtgaggtagtggtgtgggttttgtgattagtgggacaagagaagaagaaaaaagaaaaaaaatttgtgaaagaggagctgtgtcccatttctattctatctcagtatctgacaaa

SEQ ID NO: 956674 - DNA, 547 bp, Homo sapiens
ctgggactacagccatgtgccaccatacccagctaattttttgatttttgttgttgttgttgtagagatgaggtcttgctacrttgcctaggctggtctcaaactcctgggctcaagcaatcctctggcctcagcctcccaaagtgctgggattacaggcatgggccaccatgcccagccacaatagttatcttgagtaatggaccacctggtggtctggccagcagcaaccatgctgcaaatcactgttgaacattccttcctgaagtaggacactccataaccttggtttgatatttagatttccaaaggccagttcctgaaattctttaagtaaaaggcatggttaaacattatgagagcacagaagaatggctatttgctttgtacaactaaagcctcagggttagcaggaatattggtatattgccagtgaggtagtggtgtgggttttgtgattagtgggacaagagaagaagaaaaaagaaaaaaaatttgtgaaagaggagctgtgtcccatttctattctatctcagtatctgacaaa

SEQ ID NO: 956675 - DNA, 552 bp, Homo sapiens
aacaagaactttgggacatcactgaagtcaatcactacaggctgacatcatgctgtttcttggaatcctgttggtagtaaccttaactgaatgctctaccagataaattgaacagatttggctccagcctttgttggtcagattaatgaaagtggttgatcaagtcacttactcatggaaaacaattttctacacgcccagatggtataaaatcaatggatacgctggatgtggtggctcacacctgtaatcccagcactttgggaggccaagacaggtggatcacctgaggtgaggagttcgagaccagcctgaccaacatggtgaaaccccgtctctactaaaaatacaaaaattagccggatgtggtggcgcatgcctttaatcccagctactagggaggttgaggcaggagaatcgcttgaacccaggaggcagaggatgcagtgagctgagatcaygccattgcactccagcctggcaagagagcagcctggagagcaaaactccgtcaaaacaaaacaaaacaaaaaaacaatggatgcatatttt

SEQ ID NO: 956676 - DNA, 552 bp, Homo sapiens
aacaagaactttgggacatcactgaagtcaatcactacaggctgacatcatgctgtttcttggaatcctgttggtagtaaccttaactgaatgctctaccagataaattgaacagatttggctccagcctttgttggtcagattaatgaaagtggttgatcaagtcacttactcatggaaaacaattttctacacgcccagatggtataaaatcaatggatacgctggatgtggtggctcacacctgtaatcccagcactttgggaggccaagacaggtggatcacctgaggtgaggagttcgagaccagcctgaccaacatggtgaaaccccgtctctactaaaaatacaaaaattagccggatgtggtggcgcatgcctttaatcccagctactagggaggttgaggcaggagaatcgcttgaacccaggaggcagaggatgcagtgagctgagatcatgccattgcactccagcctggcaagagagcagcctggagagcaaaactccgtcaaaasaaaacaaaacaaaaaaacaatggatgcatatttt

SEQ ID NO: 956677 - DNA, 767 bp, Homo sapiens
ttcttcttcttcgctattctccctaacatccaccattatgataaacataagatttcaggttcagaaaattcctgaaaatcatagattcttgaaataagttggaagtaaccttagaagtaacattgccataccttgtcacttaaaattgaagacattatggactagaagtttaaggaccctgcttgagctcacagagctagtttgtgaatgatacaatgaaactagtgttcatatctctgactctgcaccttggtgcctaccatctcatttttactcctgctgatgcttcgtatttcccgttaaaaaggtagttttttagaatagcctgattttcaaacccattctgacacagagtgaaataagcactttgggtggaaaacagttttaaaatatacctgggtggaaaattaccttcaatgaactgtacttagagtcactgtatggtttctagttattccacaaatgcaaaaagagaggggcctcccttatataagtatgtcctattctgagcttccttgttagcccatctgtttgatgagctcagccacctggattctttctggccttttcacttttcatcagaatgtcttccagccttaaacatgtggtgagtctttggcctcttgctagcatgtagaaaatkgtggtaatgactatttttttggagaacagacagtgctgtcatttgtgctcacctttgaatctgacctgtcagcatcacatatgcatcaaagagggtaaattgcctgttataacaaaggctgctc

SEQ ID NO: 956678 - DNA, 575 bp, Homo sapiens
atacttattacgcatttaattaggtaattacaaataatccaatattrccagcaactcactagagacgtttaaagttgagtattctaaatttttaagctaataaatgtgaagaaagtataaatcaggtaggagatttgatcccaaaacttttcagctcccagacatcatttatgaaagatagaggtgcaaaaaagaacatcagtattccacacaaatcatgtttcttttcttcttaccatcgcttattggaacacactatatacataagaattaattaatttagtaatgagggataggtgttaataaatgtttaacaactggctgtcttgggagaaaagcctgatttgcagtatttgtggtttctgtggtacaaatatcaccaaaatgggcagtttcaaaacacaaactcaacatcacagaatgtggaagctggaaagagacgcaggaaaagggctctctggagtgagtcttagcacactactgggtgaaagggctgcaagaatattttcagttttagggacactattctattccacaagttattttgaaaattttatttactttaaaagataatg

SEQ ID NO: 956679 - DNA, 794 bp, Homo sapiens
cagcacttccccttttgttctctctcttcctcctgctctgcaatgtgaagaaggtgatagcttccccttcccccatgattgtaagtttcctgaggcctccacaaccatgtttcctgtacatggctgtgagtcaattaaacctcttttcttcataaattacccagtctcaggtagttactcatagcagtgggagaatagactaatacaataaggctatcattgtcatagacagtgatttctctgatagatctaggcaaggtaaattgaaaaccttctggaaaggattcagcattctagaagccattgacaacgtttatgattcatggaagaagctgattctaagccttatggattacttggtggggtttgaagacgtcagtggaggaacttcctgcaaatgtggtggaaacaggaagagagctagaattagaagtggagcctgaagacaagactgaattgctgcaatctcatgtcaaacttaaaggatgaggagttgcttcttacggatgagcaaagaaactagtttcttgagatagaatctattccttgtgaatactgttgaaatgacaacaaaggatttggaatattccatatacttacgtgataaggcagaagcagtgtttgagggaattgactacaattttaaaagatgttttcttataggtaaaatgctatcaaaaagcaatatcgcacactccagaaaatactttcatgaaagaaagagtcaacctatgaggcaaacttcactgtagtcttcttttcagaaacygccacagccaccccagccttcagca

SEQ ID NO: 956680 - DNA, 461 bp, Homo sapiens
gactgaagttctgatagagttacagggatcaaaggacatatgaatgctaagttaaggaagatctgttgttttaaagttacratcctggttaggagaactttgggacactgaaacatgggatagggacatctgaatgaaggttttgagggcatgggttctgcagacctctgcatatcctcagagcctgcagaggtggttcattcatacctagcaagagctagcatttcaatgcagtggaagacactgcagaggcctcttttcggcaaggcagcaaatgccctcctcaggagcttccccagtctcttatgctggctgtcaggcagataactagggttaaaagccaccataacccaatagggagtatgctgagcctgaaacagatggacagaaactctctacctaggaattttcatgaattagctagcacgtgccagcagaagcaaatgcagtatcattgagat

SEQ ID NO: 956681 - DNA, 585 bp, Homo sapiens
ttcctccctgggatacccgctgcacggggcctggggtcccccgcgagctaggggcccaggaggtgctgggaccttccacrgggacagagagggtgttggtgctggggcacgtgccttcccctcaccctccttttgtttaatgaacacatctccctttttctctaattaggtggaacaaacaacttgaaccagaatttttatttcccagaaaagcacacgcctggacccagtaaatatgtcattaatcatcattccgaggcggaggagcacgctgggtgcagggaggagggggagcagtcagagggcctaattagagctgggtcccctccctcccctgccactggcacccaccgcccagagcccatccgttggaagggctcctggcagagtcaagcttatgtaaatgtcccttgttagcacaacggaaatgtaaagaagagaagaagaataccaacctgctcctcaccacctccccgcccctgcgcgccctacccgaagtcttagtttcatccaggaaattgttcttattatcacttggctatttatagactcgatgaggtctgctgaagagcccaaggcagggtg

SEQ ID NO: 956682 - DNA, 589 bp, Homo sapiens
gagcaacgcagaagatgaatgatttctgcatttccaactgaggtacttggttcatctcactggggagtgtcagaaagtgggtgcaggacagtgggtgcagtgcactgagcatgagcygaagcacagcaaggcatcacctcaaccgggaagcacaaggggtcagggaattcccttttctagccaaggaaaggggtgacagacagcacctggaaaattgggtcactcccaccctaatactgagcttttccaatggtcttataaaacggcacaccaggagattgtatcccgcgcctggctcggagggtcctacgcccacggagcctcacttattgctagcacagcagtctgagatcaaactgcaaggtggcagtgaggctgggggaggggtgcctgccattgccaaggcttgagtaggtaaacaaagcggccgggaagctcgaactgggtggagcccaccacagctcaaggtggcctgcctgcctctgtagactccacctctgggggcagggcatagccaaacaaaaggcagcagaaacctctgcagacgtaaatgtccctgtctgacagctttgaagagagtagtggttct

SEQ ID NO: 956683 - DNA, 574 bp, Homo sapiens; identical to SEQ ID NO: 956392

SEQ ID NO: 956684 - DNA, 578 bp, Homo sapiens
aataattctcttcatagtactcatggttatcttattcacataaaattaatcagggcacttttcagcatggtcagaatcaagggatagagaggatgaaccaagcaatccagttctcagtcaaaacccagttctcctgtggaaactggagagccaaacttgtcaaagtctgaagaagacaaagtgtatgggaatcaagttatcattggaacctgtagagtttggctaaagtttgtgtcacttaaaaacttaaaattttaaaaatatataaaaagcaaaaagataatttctatatacatgtattttatttttgcataaaattatttcagtgcttagcggtttaaaaaaatggtttttgactcacaatttctatcggtcaggaatctagccgtggcttgtctgggtcctgtggctctgggcctctcacaaggctggtactatagtttcattttaaggcgtgacttgggataaatccacaaaagggattttggcaggattcagcgtctcacagactttttcctggaggtctcctctatctwgcgccttcccatgtgggtctcttcatattggagcttacaata

SEQ ID NO: 956685 - DNA, 666 bp, Homo sapiens
ctggatgatgggacttgcagccaggatcagcttggcatcatggaactggtctgtgtgtgccattgctgggkgccccagcctgctaccctaagattgtggcacagtggggtcctctctgcttcacacctaggcatatctccaggtatccgggtcaccccctgacctggatcagcagcatgagcttcctcactcttcctgtgcatagatcatggtacagtgaggctgtctccacttcatgctgaggcagattctagacatttggagcacccactcacctggatcagtagcctaaactgccccacccttcctttgcagagatcctggtacaagaggaccctctctgctttatacccagggagagccccaggcattcagaacacctgcttgcctggttcagcagccaaagtcaccccacccatactgtgcagagatcttggaacaggggagccctttccactccatgcccaggcagatctccaggcatttggagcactggtcacctaaaacagcagcctgagcaggccacgttttatttgcagagatcccggtgtggggctgggggaggaagccctctccactccatgcacagcagattttcaagcacttagagtacctactttcctggatcagaagtttaggctgtcctcgattcctgtgcagagaact

SEQ ID NO: 956686 - DNA, 582 bp, Homo sapiens
ctctgagatgcagcaaaaacagtcttaaaaggaaagtttatagcaataaatgcctacctcaaatagttagaaagatctcaaattagaaatctaacttgatacctagaggaactagaaaaataagaccaaactaaccccaaaacaagcagaagaaagtaaataactaaatcagagcagaactgaatgaaattgagaccccaaaatttatacaaatactcagcaaaaccaaaagttggtttcttgaaaggataaaacaaggtcagtagaccaccagctagattaacaggaaaaaaagagatgagatctaaataagcacaatcagaaattacaaagatgacattacaaccaaccccacaaaagtgcaaataatcctcagagactattatgaacacttttgtgcacacaaactagaaaatctatagaaaatgaataaattcctggaaactcataatctctcaaaatgaaatcaggaagaaattgaaaccctgaacagascaatattgagttgcaaaatcgaatctataataagaaacctaccaaaacaaacaaataagcaaacaaacaaacaaaagccctggacca

SEQ ID NO: 956687 - DNA, 665 bp, Homo sapiens
ctggatgatgggacttgcagccaggatcagcttggcatcatggaactggtctgtgtgtgccattgctgggkgccccagcctgctaccctaagattgtggcacagtggggtcctctctgcttcacacctaggcatatctccaggtatccgggtcaccccctgacctggatcagcagcatgagcttcctcactcttcctgtgcatagatcatggtacagtgaggctgtctccacttcatgctgaggcagattctagacatttggagcacccactcacctggatcagtagcctaaactgccccacccttcctttgcagagatcctggtacaagaggaccctctctgctttatacccagggagagccccaggcattcagaacacctgcttgcctggttcagcagccaaagtcaccccacccatactgtgcagagatcttggaacaggggagccctttccactccatgcccaggcagatctccaggcatttggagcactggtcacctaaaacagcagcctgagcaggccacgttttatttgcagagatcccggtgtggggctgggggaggaagccctctccactccatgcacagcagattttcaagcacttagagtacctactttcctggatcagaagtttaggctgtcctcgattcctgtgcagagaac

SEQ ID NO: 956688 - DNA, 488 bp, Homo sapiens
ccatttatgtccttgagtgctgtctcccaaggttgctaaaagcaggcctctggcattcctgataagaaycagaccacatgcagttggctgaagacaagatggactccagcactgacctttcaccaagttttccttataataatcacatcgtaatactaaaaatcacacccagggctggagatttaacgcactaatgagacatatgatgcatgagaaacacatagtcaaactgcgcaggtgctaaaagttccccatccctacatgcctacatgtcactcctttttctcgcctcagcttccttaaaatgacaagagccaagtccttccaggagctagcaccaggatccctttcccatacaatgctcccgcgcagttgctccagacgcaagcctatgaaaccttgcctgagtaaaagttctgtttggcctggtgttaatttctttcttttctttttttgtgaggggggtgggggacggagtcttactctgt

SEQ ID NO: 956689 - DNA, 626 bp, Homo sapiens; identical to SEQ ID NO: 956497

SEQ ID NO: 956690 - DNA, 640 bp, Homo sapiens
acatcacactctggggactgttgtggggtggggggagggtggagggatagcattaggagatatacctaatgctaaatgacgagttaatgggtgyagcacaccagcatggcacatgtatacatatgtaactaacctgcacattgtgcacatgtaccctaaaacttaaagtataataataataagaagaagaataagaatactttcaatgactttaaaaattaactgttttgaacttttcaaattgtcaggaatttaaaaaaatacatatatcattaaaaaatactcaaagcttccctctatctaagggcatgtcttatttgccagttggcagatggaccaccacgtttgtaaataaatgtgtccttcctgtgggctgtaacctctgcaccatctttctgttgtttgtcattctcgtacagaggtggtgaatcataactttcgcttggtggctgttatgtgcttagcactgtgctaggtattggacatactgggccagtgaaaggatctttataaaagggagctttttgaaaataaatgtatttaacttatgctgatgtctttctttcagttgtctttccagaaattaagacaggctgatgttgagccatccatgcactcccacgtaatgtaattagttacc

SEQ ID NO: 956691 - DNA, 562 bp, Homo sapiens
agggagtagcgttatcacttggtgagagagggagcaagagataggagggaaggtcccagactccttaacaaccagatcttgagtgaactgagcaagaattcactcatcaccaaggggacagtgctaagccattcatgagggatctgcctccatgaccccaatacctccactaggctccatgacccacattggccgttacatttctttttctttttttttgagatggagttttgctcttgttgcccaggctggatggagtgcaatggggtgatcttggctcactgcaacctccacctcccgggttcaagcaattctcctgcctcagcctcccgagtagctgggattacaagtgggcaccatcacgcctggctaatttttgtgtttttagtagagacggggtttcaccatgttggccaggctggtctcgaactcctgacttcaggtgatccgcctgccttggcatcccatagtgctggaattacagrcgtgaaccaccgcgcccagccagggattacatttcaacatgagatttgaaggggacaaacatccaaaccatatcagg

SEQ ID NO: 956692 - DNA, 562 bp, Homo sapiens
agggagtagcgttatcacttggtgagagagggagcaagagataggagggaaggtcccagactccttaacaaccagatcttgagtgaactgagcaagaattcactcatcaccaaggggacagtgctaagccattcatgagggatctgcctccatgaccccaatacctccactaggctccatgacccacattggccgttacatttctttttctttttttttgagatggagttttgctcttgttgcccaggctggatggagtgcaatggggtgatcttggctcactgcaacctccacctcccgggttcaagcaattctcctgcctcagcctcccgagtagctgggattacaagtgggcaccatcacgcctggctaatttttgtgtttttagtagagacggggtttcaccatgttggccaggctggtctcgaactcctgacttcaggtgatccgcctgccttggcatcccatagtgctggaattacagaygtgaaccaccgcgcccagccagggattacatttcaacatgagatttgaaggggacaaacatccaaaccatatcagg

SEQ ID NO: 956693 - DNA, 609 bp, Homo sapiens
agatttaaatgatgcagaaaatacccaggattatcactagagttggtgcaccacataagctattcccaaagcacacatgatgaaacggagttttctatgtagtgggctgatgcttaaaaggcatctgaggagatcaacagccagttggatcttagtttcttattccatgaccacgaaatgagttggaggacggaaggagttaatttgtgtgtcagagaagcaagggcaaccccacagcttgcaaaaaaaaaaacaaaaataagtgcattttatttaaacaacggaacaaacatcagagagcatcccctgcaaagcccccaccccagagcctgctgatggaagcggggctgcaggacgctctgccacaacggcagcatctccaactgcacaaagaccccttgctgccagggccgggcaccggcctagctccttgcctgcctgcctgaggcagccgtggaatcagggccaggggtggcacaggtagaaaagacagatggaaacaatgcccatgaatatacccaaagtgtcccaggaggataaaagccatcatgaggaccagaagccaacccagtctttttttggcctccyggagaagttgtttttgagacc

SEQ ID NO: 956694 - DNA, 577 bp, Homo sapiens
actaacgttctagccaatgggatgtgtacaaaatgatatgtacaactttgggatcacattctctaatgaaactgcttgtctgccatctgctatatcacgctccctgtgggctgacatacagatgtgatggcactgggccaactttgaacttgaatatgaggaaatactctagaggctggtggagccacaaggaatctgggcccctggatggtggagaagcgccatcacctgtctctgactatcctcctatgggtggaccattagccaacagtgttcacacctgtctcatttacctgctgtattctggggttcctctgttacagcagcttagcctatacccgactaaatacagtgatttagcagaggaaaggaaaagtggtgtgggaacaaatattccatccctgtggaatccgtcagattcatctgaggaagtggtttttagccaagtcttgaaagtatatagattgagygagtgatcatatgtatgagtagtatcaatgaaatagcttgtttctaaagttcagaatactggaaatgaaattttaaaatctctgtgtaaactttatattttatttac

SEQ ID NO: 956695 - DNA, 552 bp, Homo sapiens
ccttttctgtgagagggaaggcaaatgaagtgaaataccttatgtccaagmtttcttttcattgagggggaatacataactatgcaaagcttacaatttacgtcccacaggtggacctctcagcttacccccatatcctagcctccctatagctccccttcctattaatgataatcctcctctaatctcccctgcccagaaggaaataagcaaagaactctccaaaggatcacaaacaccccctccacgggctatcagttatgtcccattcaagctgtagggggagggaaatttggcccaacccgggtacatgtccccttctccctctctgatttaaagcagattaaggcagacctggggaagtttttagatgatcctgataggtatatagatgtcctacagggtctagggcaaaccttcaacctcgcttggagagatgtcatgctactgttagatcaaaccctggcctttaatgaaaagaatgcagctttagctgcagcccgagagtttggagatacctggtatcttagtcaagtaaatgatagaatgaca

SEQ ID NO: 956696 - DNA, 641 bp, Homo sapiens
gctagaagattagcaactgtgtagataagaaaagkcatgatcataataaacctgactgtattgtcaaaaaacaggagggttagcttactccttcctgccttaaatcctagagctcacttctattctttactaataaatgttctttgtggtatttttctgtacagaatagaggactttgacacacattaaaaacctgttacagcaaatattccttctcctcagtggttttcttaatggtgtcttggaacttgtctgctgcttcttgggcaacagaagctgtttttctcattatcttgacaatttttaagccaaatatctttgtaaaattatcaaaccatcctttgctaacactaaattctccagctttagatccttcaccttccttttgagtaagtcatcctttaatgactttgctttttcttgaataatattagactctaaatgtatgcctttcttatacccaatcatacacctacataaaagctgcattttcaaaattacagaaaaaggtatttccccagaagagcaaggttttcacatctgctggtgtagccacagggatggcttcatacgtttccttttctttcgttatgttggtctttccttatgctggatttgtttatcttgaaatgaagggcatc

SEQ ID NO: 956697 - DNA, 618 bp, Homo sapiens
ctcaaaataatacaaggagatgactmtcaaatgtgagattgcctagcttggtgcctgctgctcaggaggccctcaatgaacgctagtttctttttactttataattcttcagagggtctcactgaccaaagagcaaagcctgcctcttcctagctggtgccctgggatgccttcctgtcccagttaacactgggcacactatgctccagccatgcagaaaagctctgggatgccctcacacctgctaatctcttacctgccctttcctggctacagaaaccctgcccgaccctttagggaccatctcaaaagccatttcagccacaaagcttcgtaacagcaccccactctgtactgccacaggacttactggttctatgttttctttgttaaaaaatatatcacttttggaaatcatatattgatacctttgaaatgcttcccccatttctcctttttcctttacctccacttcctatgtctctcttccatttgcagtttattaattcgttcattagctatgtattgagtgcttgctgcctgccatgccctgtgctggccactgccctgtacgtgatgaaccagtcacccgtctccttcctcttcctctctagctgg

SEQ ID NO: 956698 - DNA, 756 bp, Homo sapiens
gaaacccctttttccctgttaatacattcacctgaaaatgcacagccactcccatttcctctagatctggggacacgggcccagatgccatgtaggaagtttatcttcacaccccctcttcccattctgtgagcagccactgctgctccaggatgtctatgctcttcaactctttgtagcacaggactcagctcctgtgcatacagcaagaggacaagaatgactacaggtgcaggcaagataacattaatttttttttttagtcctactatgttctgggcactttgctgagtcctctacatgtggtatatatcttaaatttcaaacatcctcttcatatatatgttttatacaaacacatgcatatatatattttgtaaaataagcaaaatagacttcaaaagttaagcaacttgcccatggttacatagctagtaactagccagagtgtgattgaaacccaactcatctgctaaggagatcaaagtatcaactaggggacaatttatccaaaattgccattttatagatgacaattccaagggttatagcagtgatattacttgcccaaggttacacagtgacactagatgggctagaagtggattctagatttctgaatggccaaattaataattttcctacggtgtgatcatgcagtcctgacggyagaatttcggatatcagttgaggaatgggaatggattctcagggcaaacaatgttacttgccctccaaaaatcagactgggaggcc

SEQ ID NO: 956699 - DNA, 458 bp, Homo sapiens
aagtgtgctgccagacatattggttcttctttaaatgcagtttcctttctctcactgcttttgggatcttttccttatttttgacctttggaagtctgaytattaattgtcttgcagtagtcttatttgggttaaatatgcttggtgttctacaaccttcttgtgcttgactattaatatcttttcctagggtttgaaagttctctgttattaatacatcaaataaatattctaccctgatctctgcacctcctcgttaaaaccagtaactcttagatttgcccttttgaagctattttatagatcttataggcatgctttattcttttttcttttatctcctctgactgtgtatttcttttgcttgatcagttctgctgttgagagactctgatgcattctactgtaggtcaattgaatttttcagctccagaatgcctgcttgaatctttttagtt

SEQ ID NO: 956700 - DNA, 656 bp, Homo sapiens
attgaagagactgtcctttccccagtgattattcttcttgcctttktcaaaaatgagttggctgtaaatgcgtggatttctatctgggttctgtattctgttccattgatctttgtgtctgtttttatgttagtatcatgctgttttggttactatggctttctaatacattttgaagtcaggtagtgtgatgcctacagctttattctttttgcctgggattgctatggctatttggggtcttttgtggttccaatttaggatcgtcttttctatttctgtgaagaatgtccttggtattttgatagggatgccctgaatctgtagatcacattaggtaggatggacattttcacaatattagttattccaattcatgagcatggaatattttcccatttttaaaatgtcctctttaatttctttcatcagtgttttatagttttccttgtagagatcattcctttctttgtttaactttattcctaggtattttatattttttgtatttaatagctattgtaggattgctttcttaatttctttttcgttttgtttgatgttggtgtgtattaatgttagtgatttttgttgttgattgtgtattctgcaactttactggatttgattattggttctagtagtttgctgatgga

SEQ ID NO: 956701 - DNA, 573 bp, Homo sapiens
gcctgcaatcctagctactcaggaagctgcagtggaaggattccttgagcccaggagttcaaggttscagtgagcttacattgcatcactgcattctagcctgagtgacagagtgagaccctgtctccaaaaacaaaaagaaaagggtctggtatggtggcttacacctgcggttccagcactttgggaggctgaggcaggatgattgcttgagcccagcagttcaagaccagcttaggcaatacagtaagaccctgcctctacaaaaacgttagctgggcatggtggcacgtgcctgtagtcccagctactcaggaggctgaggtgggaggatcatttgatcccaggtggttgaggctgcattaatgcttactataatctggggactcagggttaagtacagtgcctgaaggtgtgacgctgtaaggggtagggccaggattcacacccaggtctactggctctcaaccgtgactgcatattggaacactctgaggcgccttaaacaatatgactggatcctgggcagtcagacattctgactgaactattctgggatgtgtggcctgagtg

SEQ ID NO: 956702 - DNA, 789 bp, Homo sapiens
gctaatacgtcatagaaaaaagtagatcaaagttggagaactcacactttcccattcccaaacttattacaaactgcatgatcaagacagtatggtactgacataaagataggtgcatagatcagtgtaattgagagtccagaaataaacctttaaatttataacacattgattttcaactcgggcaccaaaatagtaacttttataactcaacaactaaacctaggaaaaaggtaggtaaaggatctgagtagacatttacccaaagaagatatacaaatggccaataagcatgtgaaaagttgctcaacgtcattagtcagtagaggaatgccagttaaaaccagagatactacttcacacccagtaggatggctgcaatacaaagggcagacagtaacaagtgttggtgaggatgtggagacattggaaccctcattagttgctggcaggaatgtaaagtggtgcagccactttgaggagcagtttggcagttcctcaaaatactacacacacaattaccatgtcacccagaataggcaaactcatagagacagaaagtggatgagtcattgccagggcctaggagtgggagggaatgggtatggtgcttcattttgggatgatggaaatcttctaaaattagatgatggtgatggttgtacaactctgtgaaggtactaaaaaacgaattgtatacatttatagtgttaattttatggcatgtgaattatatatcaacaaagctattatctaaaaaaagaatacastgtgtgctaaaggacctaa

SEQ ID NO: 956703 - DNA, 590 bp, Homo sapiens
gatccccaaaattaggggtgccattttatactggatcctggatcggatccctaaaaggagggaaatactttgggagaagtcagtgtggtgcttttaccaactgtgcatttccttgcaaggcaacccagmcaatcagcccatcttataattagaccatcccccatgagagtctcatttctcattgggggttggggatgtttccatatcttccaggtagccaagagcatgcttttctgatccaggtgtgcaaagagtcaagtgttcctccataactactattagccatcccctaaggtatatttcctacctagttattacacaccaagctctttcataatgaaaagtaatttctgatacccctaaaactcaaaactgtcagatgacacaatgcgaaacagaacacagcattttgagagggatctatccgcttttaattcctggggtttcatgaggaaaacagagctttcttccgaaacggtgtctgtggcaccttctgtttttcccaaggagttccaggctaccagaaattatcttagggcccctcgtgtgtgcattaagagtggcaagacaaaaaaaaatggagaaaaata

SEQ ID NO: 956704 - DNA, 617 bp, Homo sapiens
caatttatacaaacacaaaggtcctatagttagagaactacatataagtaggcttgttcacactcgaacttaattgaaattctggactttgagcatatgctataatgaaataatacttttccakacattgtacatgtgttaatttacttagcatatcagagggatgaaatcatttggggccagaggctagaatctttgtgttttcctttactaacatgttcttctacagggcatttgctctctttcaggactgacatgtatttattagttttgcttataccaaccagttcattttatccctgaaatgctatttgtcttcctttttaccagctaactcctaatccttttctgacctattaaggctaaagtggatacttcctctgtgttttctcaaaaatactctgcatataaccatatgatagcacctattctatattataatgatctcttaatttttgtgtcccatagtaaaatttaagttctttgaggtcagagactctgacttattttcttatcaacatctaacaataccctggtacaccctggtaggcaataagcatttttaaaggaatgagtgaaagagtgcttgaatgagccacgtcaggctctggcttcca

SEQ ID NO: 956705 - DNA, 602 bp, Homo sapiens
cctaaatactgtgcttttcccaaggtcttagcaaccagcagaccaggagatactctcccatgcctggctcactgggtcccatgcccacggagccttgctcactgctagcacagcagtctgagatcgacctgcaaggcagtagcctcatggggggaggggtgtctgccattgctgaggcttgagtaggtaaataaagtggccaggaagctcgaactgggtggagcccaccacagctcagccaggcctactgcctttctagattccacctctgtgggcagggcatagatgaacaaaaggcagcagaaacttcagcagacttaaacgtctctgtctgacagctttgaagagaccagtggttctcccagcacagtgtatgagctctgagaatggacaggctgcctcctcaagtgggtccctgaaccctatgtagcctaactgggagacacctcccagtaggggctgacagacacctcwtacaggcaggtgcccttctgagacgaagcttccagaggaaggattaggcagcaatatttgctgttctgcaaaacctccactggtgatacccaggcaaacagggtctggagtggacctccagcaaactc

SEQ ID NO: 956706 - DNA, 577 bp, Homo sapiens
aaaaagagaccgcatagccaagacaaccctaagcaaaaagatcaaagctggaggcaacacgctacctgacttcaaactatactacaaggctacaataatcaaaacagcatggtacgggtaccaaaacagatawatagaccgatggaacagaatagaagcttcagaaataacaccacacgtctatgaccatctgatctttcacaaatctgacaaaaacaagcaatggggaaaggatttcctttttaataagtggtgctgggaaaactggctagccatacgtagaaagctaaaactggatcccttccttacaccttatacaaaaattaactcaagatggattaaagacttaaatgtaagacctaacaccataaaagccctagagaaaacctaggcagtaccattcaggacttaggcatgagcaaagacttcatgactaaaacaccaaaacaatggcaacaaaagccaaaatagacaaatgggatctaatttgtagggaccagccctacagggtctatgggtttttctccccatgtacagagatgagagattgtagatataaagacacaagacaaagagg

SEQ ID NO: 956707 - DNA, 585 bp, Homo sapiens
ctactttctgcctctatgaatttgamtactctaggtatttcacataagtggaatcatacagtatttgtctttttgtttctagcctagttcacttagcaaaatgccctcaagttttatccatgttgtagcatgtgtcacatttccttcctttttaaggctgaataatacattgttgtctttcaatgcttattaattccattgtgtgcgcatgtgtgtgtgcaaatgtgtgtgtgcttctgtgtgtatttacatatatttatatatacataccacatttttgtttatccgttcaatcattgatgaacacttggattgcttccaccctttggctattgtgaataatactgcaatgaacaaagatatacaaatatatcttcaagaccctgctttcaatttttggggggtggtatatgtccagtgtggaattgttggattatacagtggttctatttttaactttttttctttttttattatactttaagtcctggaatacatgtgcagaatgtacaggtttgttacataggtatacacatgacatggtggtttgctgcacccgtcaacccatcatctacattagatctt

SEQ ID NO: 956708 - DNA, 607 bp, Homo sapiens
cctagttcacttagcaaaatgccctcaagttttatccatgttgtagcatgtgtcacatttccttcctttttaaggctgaataatacattgttgtctttcaatgcttattaattccattgtgtgcgcatgtgtgtgtgcaaatgtgtgtgtgcttctgtgtgtatttacatatatttatatatacataccacatttttgtttatccgttcaatcattgatgaacacttggattgcttccaccctttggctattgtgaataatactgcaatgaacaaagatatacaaatatatcttcaagaccctgctttcaatttttggggggtggtatatgtccagtgtggaattgttggattatacagtggttctatttttaactttttttctttttttattatactttaagtcctggaatacatgtgcagaatgtacaggtttgttacataggtatacacatgacatggtggtttgctgcaccygtcaacccatcatctacattagatctttctcctaatgttatccgtcccctagccccccatcccctggcaggccccagtgtgtaatgttcccctccctgtgtccatgtgtcctcattgttcagctcccacct

SEQ ID NO: 956709 - DNA, 593 bp, Homo sapiens
ccacaggtgcagtagcatgtgcctgtagtgtgagctgcttggtaggctgaggcaggaggatcacctgagcccaggagttcaaggctgcgttgcactatgatcacgcctgtgaatagccactgcactttagcctggaaaacatgagagaccccatctcttaaaaaaaaaaaaaaaaagtaaaaaatttaaaacactagttcaggaaattcaacatcaataacaaaataaaaacaaaaattagagaaaaataaatygataaaataactcatgagatttcccaaaaacaaaagaacatgaatttccaagctgaaagaccaccatatgttaagtacaattgatgaaaataagtgaacactaagacacatcattatgaagtttcagaacactaaggttaaagataaaattcaaatagaaaaaaaatgggaaggtcacaatgaaagaatcaagaattagaatggttttaaacttttcaacagccatactaaagaaggcaaaggagtgacatgtttaacgttctgaagaaaaacaatttacaaattagaattctgtattagtcaggatgggcttggttatactacaataacagacaactc

SEQ ID NO: 956710 - DNA, 618 bp, Homo sapiens
ctatagatgaatataaaggatgtgagggctctatttatcctctagcacattctagacggaaaccaagtttcccactkttagtggacagaagaagaaaagaggggagatgggccaactcccgaagtccgctctatgccagacacaagttctgatctccaaataccatctgtatgtgtccggggtgggcgtgggggccttggtcatggtgtcctatgattcagacacaaccatcctattctttttttttttttttgagacggagtctcactctgtcccccaggctggagtgcagtggcgccatctcagctcactgcaagctccgcctcccgggttcacgccattctcctgcactcagcctcacggagtagctgggactacaggcagcccgctaccacgcccggcataagttttatttgttgttgttttttgtatttttagtagagacggggttttcaccgtgttagccaggatggtctcgatctcctgacctcatgatccacccgcctcggcctctcaaagtgctgagattattcttaaataattttatacacacccattttcccccttttacctgtaaactttgaaatgaagttgaaaggccaccagtgtccatgacag

SEQ ID NO: 956711 - DNA, 657 bp, Homo sapiens
ggcactcctaatgtttcctgtggtataagacaagagtgagcctcctgtgaagggttctagaatggtgggaaagctggacgtccacctccaactttctttttccactgtagaaatagtgggtccggtgaaatcctctgtgtgtcgtgctgtgccagcttggtggaggggtggcatgctctcaaaatgaactgtttctcttactgttcaagcacagcttctcttagttctgcagtacaattgggtgtctcagtctcactcctgagttctgggatattcagaaaggtattcttgcctgtggatagttgctagttggatttccatgtgggggtgtggagctggagaaattctattctgccaccttgtgaagtcattctctggaataattttagatttacatagagttgcaaagatggtaaagacagtttctatacactcttcacttagtttcttctgatgttaacctcttatgttaccatggcacatttattaaaaacgagaaattaacattgtacaatactatcacctaaatgacaggctatatttaaccagtttttcatttttgagaggaagtctcactctaatgcytaggctggagtgcagtggtgcgatcttggctcactgtaacctcaacctcctggtttcaagtgattttcattc

SEQ ID NO: 956712 - DNA, 461 bp, Homo sapiens
cattttgacattttaaggaacatttctgtgtctctgttctagcccctgatgttacctttggagactaggaggaagagagagggartaattaatatatttataagaacatatttttgagtaagaagaatatgcatgagttaacatttattaatatatttttattaatcaaaatatattcacaagaaattatttatatttaagaatatactcaataacatatatgtaaaatatgttattcaggagtgcattcttaattcacatgttctttgtgccacatgtgtccactgatctctgtggaagattcataaaaacgatatgtaaggtatccaaattgctgaaaaccacagacagtgagaaaaatcttgaaggcacctagaggaaaaattaagcatttacatcaagcatttatcaatgagaagaatatattcatcggaagaatcgtattagtccgttctcacgct

SEQ ID NO: 956713 - DNA, 599 bp, Homo sapiens
aacatttggtgttgtcagtctctaattctaactattctggtgagtatataagtagtatcatattgtggctttaatttgtttccctgatgaccaaatgatgttgagaatttcttcacgtgcttattagccattggtataccttcttttgtgaagtctctgttgaaatattttgcctatttttgaaagtcagttttaatgaggcataatttacatacagtaaaaaatcatctcttgtaggtatattttctaagaattttgcaaatatctatagtcatacaattaccacaatcaagatataggacatttctgtcactgcaacagtgtccttgcaccctatatagtctatactcacccctttccacttgtaaccactgatctattttctgtccctaaagttgtgccttttccagaatgtcatacaaatgaaatcaaatggtatgtaggccttacagtcccattttaatttggttgtttgtcatcttattgagttgtaggagtgggtatatattctggatgccagcctttcatcagacatgtgtctgatgaatattttatttcagagtgtgatttgcctrttcttttttagtggtattcttggt

SEQ ID NO: 956714 - DNA, 608 bp, Homo sapiens
ggcagaaggatttcttttcctttgggtatatacacagtaataggattgctgggttgaatggtagttctattttcagttatttgagaaatctctgaactactttccacaggggctgaactgttttacattcccaccaacagtgtataagcattcccttttctctgtagcctcactagcatctgttgctttttgactatttaatagtagccattctgaatgtgtatgagatggtatctcattgtggttttgatttgcatttctctgacgattagtgatgttgggcattttttcatatgtttgctgggcccttgtatgtctttttttgggaagtgtctgttcatgtcttctgttcactttttaatggagtttgtttttgcttcttgaattgtttaagttccttacagattctggatattaggcctctgtcagatacatagtttgtgaatattttctcccattttgtaggttgtctgtttactctgttgatagtttcttttgctgtgcagaaagytctttagtttaattaggtccagcttgtcaatttttatttttgttgcaattgcttttgaggacttagtcagaaattatttcccaaggctgaggtacag

SEQ ID NO: 956715 - DNA, 586 bp, Homo sapiens
tatataattaacacttatataaggtatctaaaataattaaactcatagaaacagaaagtagactggttgttaycaggggctgagcagagtggaaaatggggagttattcggtggtctagagtttctgttttacaggatgagaaagttatagagatctgttgcacaacaatgggaatatacttagcattactaaacactacatttaaaaaatagttaagatgggctgggggccgtggctcacacctgtaatcccagcactttggggaggctgaggtaggcagatcacttgaggtcaggagttcaagactagcctggccaacatggtgaaaccccatctctactgaaaatacaaaaaaattagccgggggtggtggtgggcacctgtaatcccatctacttgggaggttgaggcgggagaattgcttgaacctgggaagcggaggttgcagtgagacgagattgcaccactgcactccagcctaggtgacagagcaagactccatctcaaaaaaaaaaaaaagttggcaattttgtggattttttatcacaagtttttaaaaatgcttgtcaggcccccactctctct

SEQ ID NO: 956716 - DNA, 569 bp, Homo sapiens
aaagatttcagaaagttgattattaagctactcgaggagataccagagaaaggtgaaaaccaatttaaggaaatttttaaaaaatacaagatatggatgaaaaatgctccagagaaatagacattattaagaaaaaacaattataacttctggaaatgaaagacacacttagagaaatacaaaatgcattgaaaaatttcaacaatagaattgaacaagtagaagaaagaacttcagagcttgaagacaaggtctttaaattaacccgatcagacagaaacaaagaaaaaagaatttaaaaaaataaacaaagcctccaagaaatttgggattatattaaacagccaaacctaaaaataactggtgttcctgagaaagaagagaaatctacaagtttggaaaacatattgagggaataattgaggaaaacttccctgacctcacaagtgatttggatgtatagacatccaaatataagaagctcaaaraacacctgggaaattaatcacaaaaagatcatcattcaggcacatagtcatcaggttatctaaagtcaagacaaaggaaag

SEQ ID NO: 956717 - DNA, 762 bp, Homo sapiens; identical to SEQ ID NO: 949356

SEQ ID NO: 956718 - DNA, 593 bp, Homo sapiens
atatgagatgccagctccacctttgccttcgaccatgattgaaacctccctgagatttcaccagaagctgaatagatgccatcactgtgcttcccttaaagcctgcagaaccatgagccaattaaacctcaaacctcttttctttataaattacccagccttaggtatttatttttgttttgttttgtgtttgtttgtttttgagacggagtctcactctgtcaccaggctggagtgcagtggcacaatcttggctcactgcacctcctccccctgggttcaagtgattctcctgcctcagcctcccaagtagctgggactacaggtgcacaccaccacgcccagctaatttttgtatttttagtacagacgggatttcaccatgttggccggatggtcttgatctcttgacctcatgatcctcccacctcggcttcccaaagtgctgggattacaggcatgagccaccacgcccagcctggtatttctttatagcaatgtaagaacagcctaacacacacacattttatctctctctytctttctctctctctctcacacacacacacacacacgagtagattttattcact

SEQ ID NO: 956719 - DNA, 604 bp, Homo sapiens
atgtcaccactaaatgagtattgataagtaccaattctgctcaacatcatacttcaagctatcaagtgaagggaaagggtgtgtactcaaggatgctttaatctagcasgagaaataggactcacacatgaaatattataataggaaacaagacaaaccacagttggatagattggtgcagttgccttgcaataaacaaaatattgtttcgtaaactttccactatgatgtatgtgctttattgtgggattttgattgaggtttgacacagttggctacgccctcaacaaaagccttccatatccaacctaaggagtgtagacacctgttggagaggttggatgccatagagggaatcatttgtccctccctcaagacaggaactgttactcatcttagctgagcactttaggaacagtgcaatgccaagatgttccaatctgggctgtcaaatcattcattttggaaagcttcatacgtactgctctttgcttgataaatatgtatacattttacattttaagtttttattttctttattgctcttctattttttaaaacatctttctagggtaggcaaagagatcacataacaaggacaaga

SEQ ID NO: 956720 - DNA, 734 bp, Homo sapiens
gagatgaacctggtacctcagatggaaatgcagaaatcacccgtcttctgcgtcgctcacgctgggagctgtagacaggagctgttcctattcggccatcttggctcctcccrccgccaccatcttattataaaaaccaaagccgcagctcagtggggcaggaggaatccatcgcacagaaatatcccgcagaccggggatgtgagagtaattgattagtgaattaatttctagcacagccagtgcctgcctcagaactagtccctcttatgaatcaataggttccacaaatgggcagcatatgtgttctgtctgcccctctatagcagggatgtggggattgcagacagacgctcaggacccttgggttggggtgggtgagatcctgttactggctgcacatgtggggcccacagagctgctcaagtcattcaggggggctggaaaatggacagcttgccaagcactaaagctggatgactttgctcttctaacccccctatactcattgcagacaggcttcttcacgctttattctgctattaggtaacttttttttaaagttaagttttttgttctcatttggagctacacagttctgttttgatggctaatctcccttcctgctgttgcttatcccagaagccccttggacaggctcctctccagctataggtgatttccacatggctgcagttcccttgcaggtggctggataaggacagcggccacag

SEQ ID NO: 956721 - DNA, 603 bp, Homo sapiens
gaatgcagggcaccatgtcccaaggctgcacagagtagctaggccctgggcctggccctcaaaaccattaatccctcttaggcttctgtgcctgtgatgggasgggctgctgtgaaggtctctgaaatgccctggagacattttccccattgtcttgactgttaacatttgactcctctttactaatgcaaatttctgcagcaggcttgaattgctccccaggaaatgtttttttgtctctctcttttctaccacatggccaggctacaaatattccaatatattttttgctttgcttcacttttaaatgtaagttccaggttcagataatctcttttttcatgcatatgagcatacatgtttagaaacagccaggtcacatacatctggaatgctttgttgcttagaaattttttccaccagataccccaaatcatctctctcaagttcaaagcttcacagatctctaggacaggggcaaaatgccaccagtctttttgctaaagcatagcaagagtgacctttactccagttcccaataagttcctcactccatctgagaccacctaagcctagactcattgtccatgtcactatcagcat

SEQ ID NO: 956722 - DNA, 764 bp, Homo sapiens
gaggttgtttgaatccatagatgtctcatggatatggaggaacattgattttttttttttttttttgagactgagtcttgctctgtcacccaggctggartgcagtgacatgatctcggctcactgcaccctctgcctcccaggttcaagtgattctcctgcctcagcctccctagtagctgggattacaggtgcccgccaccacgcccagctaatttttgtatttttagtagagatggagtttcaccatgttggtctcaaactcctgacctcaggtcacccacccgccttggcctcccaaagtgctgggattacaggcgtgagccaccgcgcctggctggaacactgtttttcttaaaatggggctgtttcagcatggcggtgcctccatgtggccttttggtgtcttcatgttatatcctgtccaggtggtgttggtataaataattctaggcaccatcatacctgagtttctcagtagccctaggaggtagcagggacaggtccaaatactctattgccactttacaaatgaagagcctgtaggagagggaagcaatttgtcccaagccagcatcaagtctgtggcacagccagcaccataatatctccaggtgctgtcacataccatatctgaatcttcgtaagaacccagggtggtcagacatatggatgaagacctggaggctcagaggggaggtttcccaaggtcacaccagtgagtggcagagtcagggctggtacacaggccccgccctggctca

SEQ ID NO: 956723 - DNA, 577 bp, Homo sapiens
tcatgaccttgtgatctgcctccctccgcctcccatagggctgggattacaatcgtgagcaactgcgcccggccactattctctatacattcttcttatttaggtccacttcactattgtctgtttcagattgtaaaattgctgagtagaacagtaatgtaatatactctctatgaactattcccagctaggaagcatcaatctttagacagttcataaagaggatgaagaggaagatgacaatgacaataaccaggagagtggacatgggattccataagggatgggaagaatggctggaattttgctaccttgtgtattaataatttaaggcagcatggtatagagaaaaaagcctggtcttttgagtgtgagatagatatggcttctcatcttatttctcttcatcatgtggccacagtatagggtttactccatggatttacaaggtcaagatacacttctaacagataggaactatatccatgcctcaakatttaaactatggatagatttataaacttcaccttggaaagtctcagaagtattctccaagcaagctaaaaaaaaaaaaaaa

SEQ ID NO: 956724 - DNA, 593 bp, Homo sapiens
gtcaggctggtcttgaactcctgacctgaggcgatccacccgccttggcctcccgaagtgctgggattacaggcgtgagccaccgtgcctggccacatktttatgtgtttctcccaccagactttaaaaacagggaaaatatcctattcacatcttggtcacaaccacagtgactggcacatagtaggtgctcaatatacatgtgtggagctggacataggcttcatttcacaagtaaacaaatgtacagatggtatacaagcactggctaagtggtgtgactgagacgatgacctgtaggacatgattatttgctttacaaaaagatttgattaacaagaactgaattaacaaatgactattctcaagacacagctatcacattgtgagagagacaccattatctcaccaataaaatagattaactaaatttggggctgcaatctaattctgaagcctgcatggaatgagatgatgaatatgaggggaggaagagaatagaagagaagaaatatatgggcaggatacagggctttctggcaaccataaatagtgccctcagtaatctgagcttttgaccaagaaaatcaatg

SEQ ID NO: 956725 - DNA, 749 bp, Homo sapiens
aaggggcatgcttcagccctgtttgtgttaaagctctttcagccccaccatcggtgggtcctgagttcttgtcctgcatccaggaagaatgaagtacgtggacaagtgaaggctgagcaaggcaaaaaggtgctctgttaagcaacagagcagctcagaggagacccacagcgtgtagttcctctccacaggcaggttggcctgttgtctgctcagctctcagcagagaggagacccacagtgggtaactgctctctgcaggcagttcatcctattattttctcagctctcagtagagagtacagtgggtagctcctctctgcaggcaggttgtcctgttgtctatccaagtctggctgagaccagggtttttatgggcttcagaggggagaaagtgcactctgattggtctatgggtggccatgggagggtccagaaaaagcaccataagttctcactctggtctgtggaaatggcagcctggcccccaggcctcaggctgtccctggcctgaaggtggggtttcaccagggacctgcactttttacccaggagcctgtctgcctcctgctaccattaaccggccatccacagtgccagtgcgcccaggctgttagtgccaaaggtgcctgcaagcctgcaccaagccacccttagcamcccttcagactccctcccgttctccttggcacccaaagtccagagggggccgaggcagcaggggtctggtgtgtcagttctggcctgag

SEQ ID NO: 956726 - DNA, 749 bp, Homo sapiens
aaggggcatgcttcagccctgtttgtgttaaagctctttcagccccaccatcggtgggtcctgagttcttgtcctgcatccaggaagaatgaagtacgtggacaagtgaaggctgagcaaggcaaaaaggtgctctgttaagcaacagagcagctcagaggagacccacagcgtgtagttcctctccacaggcaggttggcctgttgtctgctcagctctcagcagagaggagacccacagtgggtaactgctctctgcaggcagttcatcctattattttctcagctctcagtagagagtacagtgggtagctcctctctgcaggcaggttgtcctgttgtctatccaagtctggctgagaccagggtttttatgggcttcagaggggagaaagtgcactctgattggtctatgggtggccatgggagggtccagaaaaagcaccataagttctcactctggtctgtggaaatggcagcctggcccccaggcctcaggctgtccctggcctgaaggtggggtttcaccagggacctgcactttttacccaggagcctgtctgcctcctgctaccattaaccggccatccacagtgccagtgcgcccaggctgttagtgccaaaggtgcctgcaagcctgcaccaagccacccttagcaccccttcagactccctccygttctccttggcacccaaagtccagagggggccgaggcagcaggggtctggtgtgtcagttctggcctgag

SEQ ID NO: 956727 - DNA, 585 bp, Homo sapiens
aaatattttgtcagaaaaataaaaactttaatgccgttttgttcacatgacctcggtcatcttttggaaataaggacagttttaaaaattattagtaaaataaaatgtcttgaaaatgtaaacatttggtctaaatgaaggtcagatatccgatttgctaaatgctttaaggtcaaagtgtttctttaacttttgaaaattgtttgatttacctactttggagcattagattataaataaggcctggggacatacgaagagctatgcccgctagctatgctgaaaacagtcaaaccttatcttcatttctgtctgacgtcctaggatccaccccggtatatagttaaaaatcacttacttatcaagtttttcactaaaaataaaagttgctaaaagttaacattataacatacaattaagacaactggagaaacagttttacatgcaaggtgtgtaaaacgtgtttttgttaaaagattataaaaaggcacaggaatatggcttttgttaragggaatataattttgactagttcagagggtcttaaagattgtcttaacctaaaagagtaatgaaacaaaacta

SEQ ID NO: 956728 - DNA, 589 bp, Homo sapiens
tgacctatgttaaagcttattgacctatctttaagatcatggaatatttcttttgctatgtycaatctactgattaacccatcaaaagcattttttatttctcttacagtgcttttgatttctagcatttccttctaattctttcttagggtttccatctctctgcttgaattacccttcccttcttgcatgctgtctactttttccattaaagttctgaacttcttaatcataataattttaaatttcctgtccgataactctatcatctgtgtcatatcataacctggttctgatatgttttgtctcttaagactatttattttttcctcttgcatttggcttgccttgtaaactttagttaaaagaaacaaacaatgtatcaagtaacatgatctgagatagataggcctctagtgtgaaaactgactaaactggctatgaatgggacttcttaaaatgtttgctgtttttatgaatgctaaaggcttccaattcctctagtttcttttttttttttttttttttgcccctttccttgactttggattttcttaaatatctgtcaaagatatcccatatgttgcaa

SEQ ID NO: 956729 - DNA, 759 bp, Homo sapiens
acccaagctctgctgtgaggttttggggagagaccgggctagtcctggggtactcagcggtctgcatcatcacgcagatggtgtgctgtaggtaaactagccagtctcctgtgcccccagcctccctttttgggctgttttccccatttccatggaaccctttcctctgcggtcggggcctaggagccatctgtctacaaacctagtgttgaagaagaactgcatgatgccctggttcatcagcctagagaggtgggcagcaccctgcaattcccgtcctagattcatcactgcttttgcgaagctgcttttgcctgtgcttctcagccttggtgaagtcatctgcattcacagtggcttgccttcgccccccacccctggaaaaagtccttgtgctgcctgtgccgttaagaaagaggtgaccggctgggcgtggtggctcatgcctgtaatcccagcacttccggaggccgaggcgggcggatcacgaggtcaggagatcgagaccatcctggctaacacagtgaaacctcgtctctactaaaaaaaaaaaatacaaaaaattagccgggcgtggtggcgggcgcctgtagtcccagctactcgggaggctgaggcaggagaatggagtgaacccgggaggcggagcttgcagtgagcagagatcctgctacygcactccagcctgggcgacagagccagactccgtctcaaaaaaaaaaaaaaaaaaaaagtgggaccttggggaaatcccttggc

SEQ ID NO: 956730 - DNA, 743 bp, Homo sapiens
ctgtcccagcaccatttattgaatagggagtctttcccctgyttttttattgcctgtgtcaaagatcagatggttgtaggtatgcagctttatttctgagctctctattctgttccattggtctctgtgtctgttttagtaccagtaccatgctgttttggttattgcgatcttgtagtatggtttgaagtcaggtaatgtgatgcctccagctttgttcttattacttaggattgctttgactatttcgtgtctttttttgttttgtttgaattttggaatagtttctttctaattttgtgaaaaatgacattggcagtttgataggaattgcattgaatctgcagattgctttgggcagcatggccattttaatgatattaactcttccaattcatgagcatggaatgtttttccatttatttacgtcatcttagatgtctttcaaaagtgtagttctccttgtagagttctctcacctccttggttaactgtattcttaggtattgtgttctgtttgtggctgttgtaaatgaatggcattcttgacttatctctcagcttgctcattgttgtatagaaatgctataatgataaagggttcaattcactatgaaaacttaactattttaagtctacacacacccaaaattagagcacccagattcataaaacaagttattttagacctatgaaaagacttagacagccatacaataataatgggagacttcagggcccca

SEQ ID NO: 956731 - DNA, 697 bp, Homo sapiens
agccaacgtagaccttgggctgtgccttcagagggtgcaagcctcaagccttggcagcttccacatggtgttgagcctgccagtgcacagaagtcaagaaytggggtttgcaaacctctgcctagatttcagaggatgtatggaaatgcctggatgtccaagcagaagtttgctgcagtggtggggctctcatggagaacctctgctagggcagtgtggaagggaaatgtggggttggggccccacacagagtccctacctactggggcactgcctactggaactgtgagaaaagggccattgtcctccagcccctagaatggtagatccactgacagcttgcactgtgtgcctggaaaagctgcaaacactcaatgccagcctgtgaaagcagccaagaggtaggctgtaccctgcaaagctacagtggtggagctgcccaagacaatgagaacccacctgttgcatcagcatgacctggatgtgagacatggagtcaaaggagatcattctggagatttaagatttggctgccctgctggatttcagacatgcatggggtctgaagcccctttgttttggccagttggaatggctgtgtttacccaatgtctgtagccccattgtatctaggaaataactaccttgctttttattttacaggctcataggcagaagggacttgccttatctcaaa

SEQ ID NO: 956732 - DNA, 697 bp, Homo sapiens
agccaacgtagaccttgggctgtgccttcagagggtgcaagcctcaagccttggcagcttccacatggtgttgagcctgccagtgcacagaagtcaagaattggggtttgcaaacctctgcctagrtttcagaggatgtatggaaatgcctggatgtccaagcagaagtttgctgcagtggtggggctctcatggagaacctctgctagggcagtgtggaagggaaatgtggggttggggccccacacagagtccctacctactggggcactgcctactggaactgtgagaaaagggccattgtcctccagcccctagaatggtagatccactgacagcttgcactgtgtgcctggaaaagctgcaaacactcaatgccagcctgtgaaagcagccaagaggtaggctgtaccctgcaaagctacagtggtggagctgcccaagacaatgagaacccacctgttgcatcagcatgacctggatgtgagacatggagtcaaaggagatcattctggagatttaagatttggctgccctgctggatttcagacatgcatggggtctgaagcccctttgttttggccagttggaatggctgtgtttacccaatgtctgtagccccattgtatctaggaaataactaccttgctttttattttacaggctcataggcagaagggacttgccttatctcaaa

SEQ ID NO: 956733 - DNA, 615 bp, Homo sapiens
agtctagggtatggatgtaccataggttgtttaactaattatcactgaaggacacctagattgtttctagttttgtgcattacaaaccaagagctataaacattcatgtacaatatttcgtgtgaatgtaagtttttatttttctgcaataaatgtccaagagtgtaattgctgggtcatgtaagtgttgcatatttaatattttcagaaattgccaaactgttttttagagaggctgtaccacttttattcccaccagcaatgtatgaatgatccagtttctctgcatccttgctagtttttggtgttgtcattactttttattttaaccattctggtagacgtctagtgatatctcattgtggtttttaatttgcatttccctgattgctaatgatcttgaacatcttttcatgtgcttaattgccatctgtatatgtttttcagtgaaatatgtcatcatgttttttactcattttctaatcagttggtttggtgctggtttttttaaattcagttttgagaattctgtagttctatyagtccattctcatgggtcttgggcagctctaccccatggctttgcaaggaacagtttccctcctggctgctttc

SEQ ID NO: 956734 - DNA, 789 bp, Homo sapiens
gcacttcctagtacttacagatgctagcttttaaacttactttagagaattattttcaaaactcagtcattaaagatgcagaaaaggtcttcagaagggatgtttgaaatgaagaattctcaaggttgaacatcttctcccttttcaagatacataaaattgtttcaaataaaaagtgactcaaagaaaggatggtattttgtttttgtgcctaaattaatctaataacatgctcaaaaaaatgacaattcaaatgactttgaagcagaagacatattttgcaatttttattgtcaaacttgagaacacagtcgtttccccaaaatgtggctcattaaattgatttcaaagcatctttgtttcttttaattatacatgtccatctactttctaagcccttttatttggcttaaaacattccccattttctgacaagtctctaatctcttgtaagctcctcagagaaatttagtgacactctctgtcacagaatgccacatgtccacagccccagcacccctgctgaacttgcaaagctgctgattctctggtttgtgtcagacctcggcacctaaatttccttttccaggctgctgacagccatttccactgagtgctttgcctctgacttttctctctagacattcaggtcaactggggktctggtgatggcagaatttctcctgtctccttccttgcagctaaggtcatatcctgagagattgacaggctaggcaaggagcagatggggagtctcccttggctgatgtggatgtatgatgaatgact

SEQ ID NO: 956735 - DNA, 716 bp, Homo sapiens
tgcgtttatatcaataggctgtggtcaaaggtttggcttggaggaaatacaattggaaaattgatgataaggaagtctgagtatgggaggtaaagtatgtggatagatctctctgcatgggtaaagaacatgaagttatttttgccccatgtcaatgttcaccaaaaagttatttcagcagagagggatgttaataattaagtgattaggagaactcattctgtggacaccagtgagcctgtttccctagccagtcctgtcatgcccaatgtgctcatgaacaaaaagtacctgtggtggcagggatggaggctatgcatgaaatacaatgtggatttccgcttaccaaggccaatctttccactgctgagtgccctttctgccaatagtagagaccagcactgattccccaatatggtataattgctgggtgtgatagagagttattttgtggaaggttgattgcatgcaaccacttccaccatggaaggtgcagtgctttgttctacttggtatattaattactttggatatgtatttgcgtttgctgtacaaaatgcttctgccaaaatgaccatctgtggacttaaagaataatgtatccgctgtcatggtattcttcatagcsttcttctgatcaaggaaatcatttgacaccaaatgcaatgtagcagtaggcctagctcatggaattcactgatctcaccatatggtcc

SEQ ID NO: 956736 - DNA, 581 bp, Homo sapiens
acttatttcaggagaaaatagaagagaagaagagaattttcacatgcttgtaccattaaatctaccaacccactcatctagtaggttttctctcttttaaaaatgggcttttacataaggccaatccttctgcttatttgctagattgcatcccctctcactttctcaaaggcatcaatcccataattgctacctcctttccaagcatcatacatttttacattttactgaatcattctctttagcataattaacatgctaagataaacgttagcttaaaataaaaacaaagaagttttgatactccctatttctttgcttccttttagtgtaaaacttttcacaaaaagattacatttattttctccaattgctttttttctgttttatggtggtagttctagcagtagctactgttaagatcaatgatccttcctttgccaaatctaatggtggattatctgttctcatgtcacctcgtgtatgaaggttattttcrtagttctatttataatactatcttcccttggactctgtgacatcaacttccctttgattttcctttgacttaatgtgtttgt

SEQ ID NO: 956737 - DNA, 869 bp, Homo sapiens
agactgattacagcttggcttttgccttatttgaacgcagtttaaacattctgcagtctgtgagtggttgaagtatggccactgggattggtcgacactcagccactgttaacaggtgcatactattaagataggttttcgcatttgtctggctattaagctaggttacagtttaaccacaaggactcaaatatagaaatacggaatctttttaggccatatttagtttgttttaacagatggaagaatctgataccaaagttgttataatatattatctaaaatgtccagttttctggcagagcaggaacatcaccatctcagataggcactgccattttaagttccccttgattaaaaactgcctaaatccagcccaaaaaacatcaccctaatggctaatgtcagcataatcataaacctcaaaagacacctctgaccagaaacattccaaccctgagataaacccccctccaaccagagacatgccagcccctaggtaacttcccctccaaccagagacattccaaccctgcaataaaactctcctccacacaaaaacattttcagcctgtgaaaagctctcttcctaaacccttaaatacccttaatctgtaagagagaatgctcctgaccaaaatcagccagaagcccctcttgggtttattctccaaaataaacctgtctttgaattgttgatctgcttttcgtgtttcttttttctatcttcaacttcacattttcrataacaacataaacaaaatacaagacataccaaaaaataaaggaaaatataccacatatacagaaagaaaagtacagccaacggaaaacataccttagagggtacagatattggtcttactaga

SEQ ID NO: 956738 - DNA, 588 bp, Homo sapiens
agtttctgggaggggcagggatggctgaaatataccaccttatagaatgtacaaccttgctcactttgcacaaaccagyccgaacgcgtgatgctgggttttcctgttgaggatgtctgagaagttagaccccatgccttcctcagttgtcctcccctgacccaatccccacttctggtcagggatatctggccttttccaaccataagttttacctacttttatttatgcatttttttctctctagttaaatgttggtcagttggggagctttaaactttttttttttttttttgatatggagtctcgctctgttgcccaggctggagtgcagtgacatgatcttggctcactgcaagctccgcctcccaggttcacgccattctcctgcctcagcctcccaagtagctgggactacaggtgcccaccaccatgactggctattttttttatattttagtagagacagggtttcaccatgtgttagccaggatggtctggatctcctgaccttgtgatccacccacctcggcctgccaaagtgttgggattacaggcatgagccaccgcgtccagcctaacttcata

SEQ ID NO: 956739 - DNA, 629 bp, Homo sapiens
atgcagctaggtctttcccagatctaagagagattaactaattaactaaragagattaactaagagtctgaacccttttaagatagaaaaaatatatttatcgtctattttgtctgaagcctgtgacctggacgcttcatctacacaacaaaaccattgttggcggggcgtggtggttcacacctgtaatcctagtactttgggaggctgaggtgggcagatcatgaggtcaggagatcaaaactatcctggctaacagggtgaaaccccatctctactaaaaatacaaaaaattagccaggcatggtggtgggcgcctgtggtcccagctactcaggaggctgaggcaggagaatggcttgaacccaggaggcggaggttgcagtgagcagagattgcaccactgcactccagcttgggtgacagagtgagactgtcaaaaaaaaaagaaagaaagaaagaaagaaagaaagaaagaaagaaagaaagaaagaaagaaagaacgttggcttccacaatccccctttgatggttaatattgagtgtcaacttgactggattgaaggatgcaaagtattgtttctgggtgtgtctttgagggtggactgggagatccagacccaccctca

SEQ ID NO: 956740 - DNA, 739 bp, Homo sapiens
atatgagatatctagagtagtcaaaattatagaaacagaaagtagattagtggttgccagggactgaggagggagaaatgggagctgtttaatgggtgtagactttcagttttgaaaaatcaaaagttctgaagattgggtgcacaatttgaatatacctggcactactgaactatacacttaaaaatggttaggatggtaaaatttatgttagatgtattttactacaattaattttttttttaaaagaataacaaatgtgaaaaagacttggaggttttggctgaccatctactcaacattagtcaattgtgctatgtagctaccaagaaagtgctattttactttcaattgcattaaagggaatacaagataggagagctcacctcattgctgagctggcctgtctacccttggagtcccaagttcaattctgagtatcctactttaaaaaaggacactgctatctcagaccagatcccaacgacagtaatcacaattttcaaggggccagaaaccaaatcaggactgtgccctaagaagttacagaaagaactgaagctgtttagcccagaaaacagactactcagagggcatgaatacagctttcaggtacttcagagagtagttctctgaaaaagagattttatctacattttgtatagaytgactgccccagaaggcagaacaaaccaatgggtaattatagagaagtagagatcatctcattcacacataa

SEQ ID NO: 956741 - DNA, 547 bp, Homo sapiens
agagtaaggtaccattaaaaataagccaggagtgtataaattcaagatggtcagcattcggccctgctgttaaccatgggttcttatttgaaggccagaaaaggtagtccttaaacacttgaagaaatggaggaagataaattcatacatagtctgagtcagaaattcttctcgttccctgcgtctttatgtggggggataagggaagaaaacaagagttggctctgttctgtcatcatctatagatgattcttacttacatgtgattggataatatgaagtcatagttctttagggctaaacaacagagattttcctcctaatatattttcttctattttttcttgcacagaggcaaggacctagcaacacttatgaagatcctcgaatgaactgtggtttccagtccaattatcaccagcaaagaccttgctaccccttttgggatgagatggcaactcaggaagttcctactggtcttgaacactgtgtctcaggtaggaacataaacaaaagctggkaatgaggatagagttgaaggacaatg

SEQ ID NO: 956742 - DNA, 646 bp, Homo sapiens
ttcctctcttcctatttgaatattctttatttctttctctttcctgattgccctggacagaacatccaatactatgttgaaaatgaatggtgagagacggcatccttctcttgtgccggttttcatgggaatgcttccagtttttgcccattcagtatgatattggctgtgggtttgtcataaatagctcttactatttttagatatgttccatcaatacctagcttattgagagttttttagcatgaagcgctgttgaatttttttgaaggccttttctgccatctatcgagataatcatgtggtttttgtcattggttctgtttgtgatggattatgtttattgatttgtatatgttgaaccagccttgcatcccagggatgaatcaaatttgattatggtagataatctttttgatgtgttgctggattcggtttgccagtattttattgaggattttcgcattgatgttcatcatggatattggcctgaaattttctttttttgttgtgtctctgcctgatttaggtatcaggktaagtctggcctcataaaattagggaggattccctctttttctattgattggaatattttcagaaggaatggtactagctcctctttgtacctctggtaaaattcagc

SEQ ID NO: 956743 - DNA, 646 bp, Homo sapiens
ttcctctcttcctatttgaatattctttatttctttctctttcctgattgccctggacagaacatccaatactatgttgaaaatgaatggtgagagacggcatccttctcttgtgccggttttcatgggaatgcttccagtttttgcccattcagtatgatattggctgtgggtttgtcataaatagctcttactatttttagatatgttccatcaatacctagcttattgagagttttttagcatgaagcgctgttgaatttttttgaaggccttttctgccatctatcgagataatcatgtggtttttgtcattggttctgtttgtgatggattatgtttattgatttgtatatgttgaaccagccttgcatcccagggatgaatcaaatttgattatggtagataatctttttgatgtgttgctggattcggtttgccagtattttattgaggattttcgcattgatgttcatcatggatattggcctgaaattttctttttttgttgtgtctctgcctgatttaggtatcaggttaagtctggcctcataaaattagggaggattccctctttttctattgattggaatattttcagaaggaayggtactagctcctctttgtacctctggtaaaattcagc

SEQ ID NO: 956744 - DNA, 613 bp, Homo sapiens
tcttgttgtagttctaggatgtagctaaattttatttgaaacagttcaatcatttctggtaatgattttttttttcaatcttttaaaggtggggccgagcatacttaagatagggttaattttcctccactactgaagcaaaatagctttgcttactctattcaacgtcctgttacttgataagattttccactctggcttgtgacaacagcaactatttctggccctgtgtggtctacagagattgttctctctaatcattttgggtgtgattctctagccttgggtagtctcttttcatacatattgattagtacccagctgaagattcaggaagattcgctgcatatctcaggagcacgctctgtctttcattctctctgaagttctctcttccctagtactctgcactgtaatgtctagtctttttttttttttttttctgctttgtcttattaacgcagagaactttctggaatctttttagtttcttcctcyctgtgccactgcatgggatattctttccaggaaataagctgatgaaattttagggctcacttccttggttttctgagtctcacagatcgctgttctttgtttcttgatgttcaat

SEQ ID NO: 956745 - DNA, 612 bp, Homo sapiens; identical to SEQ ID NO: 946094

SEQ ID NO: 956746 - DNA, 693 bp, Homo sapiens
agccaacgtagaccttgggctgtgccttcagagggtgcaagcctcaagccttggcagcttccacatggtgttgagcctgccagtgcacagaagtcaagaaytggggtttgcaaacctctgcctagatttcagaggatgtatggaaatgcctggatgtccaagcagaagtttgctgcagtggtggggctctcatggagaacctctgctagggcagtgtggaagggaaatgtggggttggggccccacacagagtccctacctactggggcactgcctactggaactgtgagaaaagggccattgtcctccagcccctagaatggtagatccactgacagcttgcactgtgtgcctggaaaagctgcaaacactcaatgccagcctgtgaaagcagccaagaggtaggctgtaccctgcaaagctacagtggtggagctgcccaagacaatgagaacccacctgttgcatcagcatgacctggatgtgagacatggagtcaaaggagatcattctggagatttaagatttggctgccctgctggatttcagacatgcatggggtctgaagcccctttgttttggccagttggaatggctgtgtttacccaatgtctgtagccccattgtatctaggaaataactaccttgctttttattttacaggctcataggcagaagggacttgccttatct

SEQ ID NO: 956747 - DNA, 693 bp, Homo sapiens
agccaacgtagaccttgggctgtgccttcagagggtgcaagcctcaagccttggcagcttccacatggtgttgagcctgccagtgcacagaagtcaagaattggggtttgcaaacctctgcctagrtttcagaggatgtatggaaatgcctggatgtccaagcagaagtttgctgcagtggtggggctctcatggagaacctctgctagggcagtgtggaagggaaatgtggggttggggccccacacagagtccctacctactggggcactgcctactggaactgtgagaaaagggccattgtcctccagcccctagaatggtagatccactgacagcttgcactgtgtgcctggaaaagctgcaaacactcaatgccagcctgtgaaagcagccaagaggtaggctgtaccctgcaaagctacagtggtggagctgcccaagacaatgagaacccacctgttgcatcagcatgacctggatgtgagacatggagtcaaaggagatcattctggagatttaagatttggctgccctgctggatttcagacatgcatggggtctgaagcccctttgttttggccagttggaatggctgtgtttacccaatgtctgtagccccattgtatctaggaaataactaccttgctttttattttacaggctcataggcagaagggacttgccttatct

SEQ ID NO: 956748 - DNA, 602 bp, Homo sapiens
gaggtcaggagtttgagaccagcctagtcaatgtggtgaaaccctgtctctactaaaaacacaaaaaattagcctggcgtgggggcacgcacctgtagtcccagctattcaggaggctgaggcagaagaatcgcttgaacccaggaggcggaggttgcagtgagccaagatcatgccactgaactccagcctgggtgatagagctagacttcgtctcaaaaagaaaaaaaattaaaaacaactaaatcaaagaggaaactaattgcttggaacttggggccagagcctagaggaacaagaataggggccctgagtgcagggaaaagaggaagaaagactgaggcgaggagagggaggtgcagagaggagtaagactagttgccaattctaagtggatttataggcatctggagggaaaatgtaaagcaattaaagaggccaggcatggtggctcacgcctgtaatcccagcactttgggrggccaaagccggcggatcatgaggtcaggagatcaagaccatcctggctaatacggtgaaaccccttctctactaaaaatacagaaaaattagctgggcatggtggtgggcgcctgtagtca

SEQ ID NO: 956749 - DNA, 614 bp, Homo sapiens
tagtttgggccaccaccacaatttacctgatttattgtaaagcttcccaacttctctcctggttcctggtcktctcctttccatgttccattcttcaaacctcttccaaggtgatcattttaaagcacaaatcaaatcatatatccctagttaaatcctccagtgtcatcccaggcctttgtcatgaaatttaaactccttagtatggattataaagtaactcttaataatctaacctctttctctccttcctccaacccagtattttattcaattataataaactttttttttttttttaggtggagtcttgctctgtcgcccaggctggagtgcagtggcatgatctcagctcactgcaagctccgcctcccgggttcacgacattctcctgcctcagcctcccgagtagctgggactacaggcgtccgccaccacgcccggctaatttttgggtttttagtagagatggggtttcaccatattagccaggatggtctcgatctcctaccttgtgatccacctgcctcggcctcccaaagtgctgggattacaggcgtgagccaccgcacccagcctgtaataaacttcttacagctctctagatgcatcac

SEQ ID NO: 956750 - DNA, 613 bp, Homo sapiens
gtgatgcatctagagagctgtaagaagtttattacaggctgggtgcggtggctcacgcctgtaatcccagcactttgggaggccgaggcaggtggatcacaaggtaggagatcgagaccatcctggctaatatggtgaaaccccatctctactaaaaacccaaaaattagccgggcgtggtggcggacgcctgtagtcccagctactcgggaggctgaggcaggagaatgtcgtgaacccgggaggcggagcttgcagtgagctgagatcatgccactgcactccagcctgggcgacagagcaagactccacctaaaaaaaaaaaaaaagtttattataattgaataaaatactgggttggaggaaggagagaaagaggttagattattaagagttactttataatccatactaaggagtttaaatttcatgacaaaggcctgggatgacactggaggatttaactagggatatatgatttgatttgtgctttaaaatgatcaccttggaagaggtttgaagaatggaacatggaaaggagamgaccaggaaccaggagagaagttgggaagctttacaataaatcaggtaaattgtggtggtggcccaaact

SEQ ID NO: 956751 - DNA, 780 bp, Homo sapiens
taaatttatgggggagagatttattacaacaatggagagcacaagttctaattcctgaactattatatagccctcaaagtcaacatatgatgcatgaaatggggtatgtctctggtatgggactaggaaaaaatttgcaaggtttgaaagaaccgcttcaagcagaaagacaaagttcccgccaaggtttaggatatcattttttatggcagccattgttaagcctccagaacctatacctttaaaatggttaacagataagccagtttggatagaacaatggccactgagtaaagagaaactggaggctttagaggatttggttactgaacaattctcaataatcattttccaaaaatgaaactgttacaatttttggaattaactaattggattctccctaaaattactaaatctaaaccaattgaaggtgctgagaatgtttttacagatgggtctagtaatggcaaagcttcttattctggctcgacaggtaaagttttccagacgctctatacttcagttcaaaaagtggagcttgtagctgtaattgaggtattgactgcttttgatatgcctattaatgtgatttctgattcttcatacgtggttcattccacacaattaattgaaaatgctcagttacaatttcatacagatgaacaactgatgataaaaacaaaaaaggaggagaaacagggattatgggacrgcccatatacaattgaatctagcattattaactttaaattttttgagcctgcctaaaggccagatgtt

SEQ ID NO: 956752 - DNA, 602 bp, Homo sapiens
caaactggatggaattagagaccattattctaagtgaagtaactcaggaatggaaaaccaaacactgtatgttctcactcataagtgggaacgcaaatgaggacgcaaaagcataacaatggtacagtgaactttggggactcaggggaaagggtgggagaagggtggtacagtgtacaccgctcaagtgatgggtgctccaagatctcagaactcaccactaaagaacttattcatgtaaccaaacaccacctgtttcccacaaatctattgaaattaaaaaaaggaaaaagaaaaagaaagagaaaaattattttttaaaaatcgagtatcgagaacctcaaaaaaaaaaaaggaaagaaaagaaaagaaacactggtggatctctattcttgttagcttctctgccagcggctggaggtagatgaatagacctgtgaaagaacaaacacataaacagaaaattaaatgataacatgatacacgaaaagagacttataccaggttacaaagagacagcagacacattgagatcagaggagatattctggaggaktgaagataaaactaaaccctaaaaaatgagcaggaatttgccaaga

SEQ ID NO: 956753 - DNA, 568 bp, Homo sapiens
tcattgagtgtctgtggcttttcctagcacatggtacaagctgtcagtggatctaccattatggggtctggaggatggtggccttcctctcacagctccactgggcagtgccccagtggggactctgtgtgggggctcccacttcacatttctcttctgcactgctctagtagaggttctccatgaggaccctgcccctacagcaaacttctgcctgggcatccaggtgttttcacacatcttctgaaatctaggtggaggttccaacctcaatgcttgatttctgtgcactcacacactcaacaccatgtggaagctgccaaggcttggcaccctctgaagccatggcccaagctctatactggcccctttcggaaatggctggagtggctgggaagcaaggcaccaagtccctaggctgcatacagcactgggaccctgggcccggcccacaaaaccaytttttcctcctaggcctttgggcctgtgatgggaatggctgctgcaaaggtctctgagatactctggagacattttcctcattgtcttggtggttaacatttggctc

SEQ ID NO: 956754 - DNA, 666 bp, Homo sapiens
gagatacttccactcagtaaaactttgcacccattcgccaagccaacgtgtgatctgattcttctggtacaccaaggcaagaaactggggayacagaaagccctctgtccttgtaacaaggtagacgctctaattgagttgattaacacaaggtgcccgtaggcaaactaagagaacaccctgtaacacacgcccactggggctttaggagctgtaaacagtcaccccgagacactgctgtggggtgggagccccacagcctgcccgtctgtatgttcacctagaggttggagcagcagggctctgaagaagcaagccacacccccaccgcatgccctgctagggggacaagggaacctttcccatttcaatactggtacaaaaatggacacatatatcaatggagcagagtagagaacccagaaataaagcctcatacctacaagcaactgacctttggtaagttgataaaaatcaacaatggggaaaatacaccctattgaataattggtgctgggaaactggctaggcatatgcagataagtgaaactggaacgcttcctctcaccgtatgcaaaaattaactcaagatggattaaagacttatgtgtaaggcactgatttattaaaatcctagaagaaaacctaggaaaaactcatctggac

SEQ ID NO: 956755 - DNA, 591 bp, Homo sapiens
gagacagagtctcactctgttgcccagagtggagtgcagtagcccgatctcagctcactgcaacctccaccacgcaggttcaagcgatcctcatgccttagcctcccaagtagcttggtgggattacaggtctggctaatttctgtatttttcagtagacacggggtgttatcaagttggccaggctggtcttggactcctaacctcaaatgatctgcccgccttagcctcctaaagtgctaggattacaggcgagagccaccgtgcccggctgaaatcttacttttaattgtagttaataaaaacatacaaagacacgaaaacaaagccctactctgttggcttttgatttaaccccgttacactttttttttttttttttttgaggcggagtctcgctctgccgcccaggttggagtgcagtggcacaatcttggctcactgcaaccgccgcctcctgggttcaagcgattccccygtctcagcctcccgagtagctgggattacaggcgcctgccaccacgcgcagctaaattttttctatttttagtagagacggggttttgccatgttggccaggctagtatcgaa

SEQ ID NO: 956756 - DNA, 573 bp, Homo sapiens
aacaaggtgagattctgccttcttgtttcggctctcatactatatataagtgtatttcgggaggtttactcagtgccatatatttgcatttctttttttcttttttttttttttaagayagagtttcactctgtcgcccaggctggagtgcagtggcgcgatctcggctcactgcaagctccgcctcctgggttcacgccattcttctgcctcagcctcccacgtagctgggactacaggcgcctgccaccacgcctggctaattttttgtatttttagtagagacggggtttcaccgtgttagccgggatggtctggatctcctgacctcgtgatccgccctcctccgcctcccaaagtgctgggattacaggtgtgagccactgtgcccagccatatatatttgcatttctatgcttttcgtgggtgatttcgtttaaaacatcctgtaaacgtggtgatagaagggccctctggtgtttctaagtgcaagaaagctgtgatgtgtcttatggagaaaaactgtggtacataggcttcattcaggtgtgagttatagtgctgttgtgcatg

SEQ ID NO: 956757 - DNA, 458 bp, Homo sapiens
aacctatgctgagcaactgcaccctcgccttgaaacctaaacaatccctggtgggacacaggcacgggttttgcttttttstgtgtgaggtaagagtcatatgtgtgtcatcctctgatttgggcaacccaagaacatgagtgccaaagaaaataatccacccccactacccctaacatcccaagggaggaacaggtatccattatctcctgcttttaattaaggagccgtcagccagattcttttgtgtgactgagtcccaagccttgtacatggcacactttcaattatttatctaaacaaaggtgagccagagggcagcattaaacactcgcctggtaaacttgagcccaactctgagcccttggaattctcaagctaacatgttttggctttgtggatctaatttcctccccctccccccgcaaaaaaaaaggcacagcagatacaaagtcata

SEQ ID NO: 956758 - DNA, 532 bp, Homo sapiens
ggttgctattcctgtctgcatttggggactgaagactccccactctcaatccatccctgacatcctaagctttaaaaycaggcataagcgcactggatggggtgaggagaagcagctctggaatttggggctttgacaactccgccccatctgtgtgtgccaagctgtaccagagccagaggcttagggcctggggctccccaacccttacttgggctgacagtgccacctggtgcccagtcggtgtgacatgagtcccgctagagatgcaaccacaaaccttcgctctctgtgggacctctgagccaccccatgctaggcgctggggacatagaagaaattgtgaccccagatgtgaggggagaagacccagagagagtgaccactcaggatgtggaggctgtgacagcagaaagcccggggccgaggagggtcgctgagtaccacagggtcaagaaaaagaggcattgccatcaatgtaactctcactgtcttctaggccaggtcctatgcaggcctggggaccctcaag

SEQ ID NO: 956759 - DNA, 557 bp, Homo sapiens
tcccaaaaatatgcatccattgtttttttgttttgttttsttttgacggagttttgctctccaggctgctctcttgccaggctggagtgcaatggcatgatctcagctcactgcatcctctgcctcctgggttcaagcgattctcctgcctcaacctccctagtagctgggattaaaggcatgcgccaccacatccggctaatttttgtatttttagtagagacggggtttcaccatgttggtcaggctggtctcgaactcctcacctcaggtgatccacctgtcttggcctcccaaagtgctgggattacaggtgtgagccaccacatccagcgtatccattgattttataccatctgggcgtgtagaaaattgttttccatgagtaagtgacttgatcaaccactttcattaatctgaccaacaaaggctggagccaaatctgttcaatttatctggtagagcattcagttaaggttactaccaacaggattccaagaaacagcatgatgtcagcctgtagtgattgacttcagtgatgtcccaaagttcttgtt

SEQ ID NO: 956760 - DNA, 557 bp, Homo sapiens
tcccaaaaatatgcatccattgtttttttgttttgttttgttttgacggagttttgctctccaggctgctctcttgccaggctggagtgcaatggcrtgatctcagctcactgcatcctctgcctcctgggttcaagcgattctcctgcctcaacctccctagtagctgggattaaaggcatgcgccaccacatccggctaatttttgtatttttagtagagacggggtttcaccatgttggtcaggctggtctcgaactcctcacctcaggtgatccacctgtcttggcctcccaaagtgctgggattacaggtgtgagccaccacatccagcgtatccattgattttataccatctgggcgtgtagaaaattgttttccatgagtaagtgacttgatcaaccactttcattaatctgaccaacaaaggctggagccaaatctgttcaatttatctggtagagcattcagttaaggttactaccaacaggattccaagaaacagcatgatgtcagcctgtagtgattgacttcagtgatgtcccaaagttcttgtt

SEQ ID NO: 956761 - DNA, 590 bp, Homo sapiens
ggtatatacccagtaatgggattgctgggtcaaattgtatttctggttctacatcttcgaggaatcrccacactgtcttccacaatggttgaacaaatttacactctcaccaacagtgtaaaaacgttcctatttctccatatcctctccagcatctgttgtttgctgactttttaatgatcaccattctaactggcatgagatggtatctcattgtgcttttgatttgcgttcctctaatgaccagtgatgatgagcattttttcatatttttgttggtggcattaatgtcttcttttgagaagtgtctgttcgtatctgtcacccactttttgatggggttgtctgtttatttcttgtaaatttgtttaagttctttatagatttttggatattagccctttgtcagatggatagattgcaaaatttttctcccattctgtaggttgcctgttcactctgatgacagtttcttttgctgtgcagaagctttttagtttaattagatcacagttatcaattttggctttgttgccactgcttttggtgttttagtcatgaagtctttgcccatgtctgtgtcctgaatg

SEQ ID NO: 956762 - DNA, 468 bp, Homo sapiens
ctcccagggtcaagcaattctcctgcctcagcctccctagtagctgggattacaggcgcrtgccaccacgcctggctaatttttgtatttttagtagagatgcagtttcaccttgttggccaggctggtctcgaactcctgacctcaggtgatacgcctgcctcggcctcccaaagtgctgggattacaggcatgagccaccgctcccagccacaaacccaagttattttattccatcttctcctttactcagacctactctagtttcctcaaatgcctcaactagaaatctatatgtatctacctcatcccctacaagctcagtaatttttaaatactaccactgtaggctcaagtgagcaaattattgctcagtcaggttcattgacagtagttctaaagtgaatgcttgtctataaaacagagctctgggtagaagccatagttttctatgtttacagcttcctc

SEQ ID NO: 956763 - DNA, 468 bp, Homo sapiens
ctcccagggtcaagcaattctcctgcctcagcctccctagtagctgggattacaggcgcatgccaccacgcctggctaatttttgtatttttagtagagatgcagtttcaccttgttggccaggctggtctcgaactcctgacctcaggtgatacgcctgcctcggcctcccaaagtgctgggattacaggcatgagccaccgctcccagccacaaacccaagttattttattccatcttctcctttactcagacctactctagtttcctcaaatgcctcaactagaaatctatatgtatctacctcatcccctacaagctcagtaatttttaaatactaccactgtaggctcaagtgagcaaattattgctcagtcaggttcattgacagtagttctaaagtgaatgcttgtctataaaacagagctctgggtagargccatagttttctatgtttacagcttcctc

SEQ ID NO: 956764 - DNA, 607 bp, Homo sapiens
cagccttaatttcacatgaaacctcaatttccctttgccttacaaggtggcatattcacagracccaggagttagaatgtggatagctttggtgggagacagaggggacattattctacctactacagccactgagtgcttttgccacctgtcaccattttgctccatttagacacaactttagttgctttgtgtgaagagattctcattcatagagttttcatttttgtgtaaagtagtggggggcctccccttggttattgaaagagtatagaatcaagatatttaaaagtatattagctggattttatttttcaccatgcctgatttggccaagaaagaatgttaagttatgtcacgtgggctacttgaaatctcaaaaagttcaaaacattgggttcaaaatctcagagactgagatatattccaaccaactcggccctgtggaagtgccaagttttcctcagtgccactcttgaaactacatcaccaactgaccctttaatatatttttgcactatataacatttatttcttagagtaagttcttccctagaaaagaagcagtttggacacgtatattaaggccgtcacatagaatattatc

SEQ ID NO: 956765 - DNA, 598 bp, Homo sapiens
aggtttatatatttatggagtacatgagatactttgataccagcaataagtaataatcacatcatggaaaatggggatctgtccccgcaagcatttgttctttgtgttacacacagtctaattatactcttttagttattttcaaatgtacaattaaattattattggctatagtcaccctgttgtgctatcaaatactgtcttatttattctttctaagtatacatatatttgtactcattaatcatcccccacttcccccttgtaacctcactaccctttctagcctctggtagccaaccgtctattctctatctccctgagttcaattgttttgaattttagatcccacaaataagtgttaacatgtgatatttatctttctgtgcctgacttatttcacttaacataatgaactacatacggttccatccacgttattgcaaatgaaagtatcacatttttttatgtctgcaaaatcctccactgtgtatgtgtaccacatgtaaattagaggttgtctgtmtccatctgtctatcgatgaacacttaggttgcttcaaaatcttagctattgtaaacagtggtgcaacaaaca

SEQ ID NO: 956766 - DNA, 566 bp, Homo sapiens
ctggtccagggcttttgtttgtttgtttgcttatttgtttgttttggtaggtttcttattatagattcgattttgcaactcaatattgstctgttcagggtttcaatttcttcctgatttcattttgagagattatgagtttccaggaatttattcattttctatagattttctagtttgtgtgcacaaaagtgttcataatagtctctgaggattatttgcacttttgtggggttggttgtaatgtcatctttgtaatttctgattgtgcttatttagatctcatctctttttttcctgttaatctagctggtggtctactgaccttgttttatcctttcaagaaaccaacttttggttttgctgagtatttgtataaattttggggtctcaatttcattcagttctgctctgatttagttatttactttcttctgcttgttttggggttagtttggtcttatttttctagttcctctaggtatcaagttagatttctaatttgagatctttctaactatttgaggtaggcatttattgctataaactttccttttaagactgtt

SEQ ID NO: 956767 - DNA, 606 bp, Homo sapiens
ggttgtttctactttttggttatcataaataatgctgctacaaatatttgggttcatgtgtttgtgtggacatgttttcatttctattggatatatctaggagtggaattgctaggccatgtgataactctatgtttaacattttgagaaactgctaacctgttttccaaagcagcagaaccatctttcaatcccaacagcagcgtataagggttttgatttttctacatcctcatcaacatgttgtctttttgatgaccgctattcctaatgtgtatgaagtggtatctcataatagctttaatttgcatctttttaatgattaattacgttgagcaaccttttatgtacttgttgggtatttgtatatcctcttagataaatgtctatttagatcttctacccattttttcaatcggattttttaaattgttgaatggtaagttttctattatatattctaggaacaagtccatcaccaacatcaaatgtattacttgcaaatattttctcccattctgtgggtgatatgtgacttccttgatggtgtmttttcaagtacgaatgtttttaactttgacaaagttgaacttatgtatttggtta

SEQ ID NO: 956768 - DNA, 637 bp, Homo sapiens
actttttgtctcggggtgaaaggggaaggatttaaagccaaagttttagaagaaacgaaagttaaatacaaaaatcgatcaactagtattaaactcctactaatctctgaagcaagaacaaacctgttaggaagkgacctgatgttaaaactggacataggcctgcatgcctgccctgaagaatttttcacttcatttaaccttctcaccaccacagaaaaaagttacattcatcccaatgagtcatcaaaagaagggaaccgagggaaaatatgaatccccccattcatataaagttgaaaacccctggaaaaatagtaaggagaaggcaatacctaattcctctagaaggcaggataggcttgaaaactgtgattcaaggtgttattcaggataagttacttgaaccctgtatgtctccatataatacccctataatacctttaaagaaatcagatgggtcatattgactaatacaagagctccaggacattaaccaaatagtccaaaccactcaccatgttgtccccattctatatattatcctcagcaagattccatatgaccatcagtggtttacagtaatagacttaaatgatgccttttgggcatgtcccttagctgaagacagctgaga

SEQ ID NO: 956769 - DNA, 874 bp, Homo sapiens
cgtgcaccaccacacccagctaattgttgtattgttagtagagatggggttttgggtccaaaattggtgggttcttggtctcactgacttcaagaatgaagccgcggaccctcgcggtgagtgttacagctyttaaggtggcgcctctggagtttgttccttctgatgtttggatgtgttcggagtttcttccttctggtgggttcgtggtctcgctggctgaggagtgaagctgcagacctttgcggtgagtgttgcagctcataaaagcagtgtggacccaaaaagtgagcagtagcaagatttattgcaaagagtgaaagaacaaagtttccacagtctggaaggggaccccagcgggtagccactgctggctgggacagcctgcttttattctcttatctggccccacccacatcctgctgattggtagagcccagtggtctgttttgacagggtactgattggtgcgtttacaatccctgagctacacataaaggttctccaaggccccaccagagtagctagatacagagtgtcaattggtgcattcacaaaccctgagctacacacagggtgctgattggtgtatttataatccctgagctagacataaatgttctccaaggctccaccagagtagctagatacagagtgtccattggtgcattcacaaaccctgagctagacacagggtgctgattggtgtgtttacaaaccttgagctagatacagagtgccaattggtgtatttacaatcccgagctagacataaaggttctccaaggccccaccagactcagcagcccaggtggcttcacccagtggatcctgcaccggggctgcaggtggagctgcctgccagtcctgcacc

SEQ ID NO: 956770 - DNA, 716 bp, Homo sapiens
gtagtgtatttcaacttcctgtcttactcttcctcctttgccctgaccacagattcatgctaacctgttggcagatgagaagtcatgtggcgctaaaccagttttcacaggtggggacatcttakaccagcttgtttccaggcaacatattagctgaggatgaactcatgagtggatgcagacaagattagccaagcatggcccagagcagaaactgtcctatgacacatggtaaataatgcattgcatttgtttaagccactctgttttggatttttaaattcatcatttttgtttcaatagaaaacattttattacgtaattccagttgtgaatggacacagagaagatatggaaactcctaaacagtcacaaactgcagtgcaaacttccctgctacttgggatgggagctttctcagggattcttatacatacagtttcctgggggcatttgcgtcactgtttagggctaaggtcttcattatctgttctgctcaccttcaagctatagctttcctagccctgtcctcaatatttccctaatctttatttcctgagatattccaatattcatattagcccttattcttataacaagccctttctctatttctgtacagaaccaactgtggcacaggagtgaaggagaaaacagatatctgaggaagccaacaccaggccaaaagacagcctatgcaaagatgctacggaaag

SEQ ID NO: 956771 - DNA, 626 bp, Homo sapiens
ttctagtgttactgaagccacagaagggtcttaagtgggcagtgatgtgatttgcttttgcttttcaaaaaatgtactctgaatgatggattttacaaaggsaagagtaaagcatgaaaccggttaaagattgcagaagaaactgatgtttagagaagttcaatgatttgctaaaatctttctgtagattcataatgcatgtccaggcctatctgacccaacgtctgagctcctttatccatcattagatagataagaaaaagcttgtcttagaagatggacattcttgtgatagaaatagcctaaggcaagacaaatggatcactggcttcaccatgagtcttttaaaggtgatctgcaaaaagctaccatttactaggtgctaggagcattgttaattctgcaattgttagtgacaagcatatattactcaccaggcaagttcgagaggaggacagcttccttaacttgggaagcccactcttttcatctgtgtcttggtagaggtgaatcgtattccaactcccaaatgtgcctttgatagctgagttgtttacttccaaggggaaatcagttttattgcattattacacagcaggaatgaaccccaaacagatccagagagt

SEQ ID NO: 956772 - DNA, 589 bp, Homo sapiens
gatgttcaggtgctacaccttcttggagcaaagctcttattatctcctgctataagcagtttcttaatcaaaggagcagagggatctaaatatactccagctttttttggtaagcaggctgggactgctgtgtgtgcatgtgctggggtgtgtgcatgcccgtgtgtgctcgtgcatgcacatgtaccccggaggggcttctcacgtccaatcctacccaacctcacccaacaaaggaaggactgcctcccctgacaccccgaaagcttcttctccccacagaaagaaaatatcaaatttaggagggtgtgaaaaccttgatttaaactagaaacttccccctccctccacccccagcccccaaatccttcagatatgtctttctgctccctctgacatcctgggggattactctttcctaagacaccatctccagcatgggcaaccttcgtgaccacacaytcaaaccatcatataaactgacgccttttcctttcgcccatcttctcctccctttgcccccaggttgctgctgaaaaaggtagcagggctgtaccatccactcggcaagagagaaagagaggcagag

SEQ ID NO: 956773 - DNA, 602 bp, Homo sapiens
tgttgcccctctgcagtgggggcctgctccagtgcccaatctgtgcggtttgcatagagggggtgggactctggacggacctgttctgatgggggcagtgtgggttggggagtggaaatcttttctcttgcatgmccaaatgtcagtttagtaatttccccttacagagaacccagaactaactctcctgtttccttcttattggagttaacaatttactttctctgtgtaaaccctgggtttgacattattttcacttccattgcttctccccttccctgtggttcaggaatgaaatagaaaggcttttttttgaataaatttctcagtcattgtcttccccaattaacttcaggccagcagatgttaaattaagtcctgactgtgtgccagatcctcttggaacggagccagctagagggtgtggagtatgtgggaacatctctgtgctttgccctcggatgacaggggctccagatgctgcctcagcatggaagggtggtgtgggtgtggagctgggctcctcacttgctctgagagattgtatattcccagagtcccccaactattcatatgtccagattgaaagactgacggaggct

SEQ ID NO: 956774 - DNA, 603 bp, Homo sapiens
ctcccactttcttccaccatgttcttagatccccatggttttaatacttactgagcaaagtagtgtgttaaagggatgtttctgagtagatcacaagagctctaaagtcagcctgagatggttttcagacatgtctttttctttatcatcaatttagatggtcttgcttttttatgaaccaatgagtggtgctctctgcccctgacaccacttcctgggccccctgtggcagagtcccagctactaaatgagactctaagcacatctgtctccccaatcctccaacacaggaaatccagttgctgcagtcgcacatctcagagacgtcggtcattgtgaagatggacaacagccgtgacctgaaccttgatgggatcattgctgaggtcaaggcccagtatgaggaggtggccaggcgcagccgggctgatgctgaggcctggtaccagaccaaggtgggcagtggaggctggggaagggatgtaggcagctctgggaatgactcatatataacagatcaggcccagggaggtttgaggcccccaactcagtgggggctgtgatcytgacctgacctccgaaccctcaaaataccctcctctc

SEQ ID NO: 956775 - DNA, 745 bp, Homo sapiens
tttagatttttaattcagaggtctttgattttgggggtggggmacattttggaggacaaggcctgaaggaagttgtttttatagacagcaggtcctcagagattatggtttagaggaacgggtgaagcaggcctggaagtatgtttggacagccgtttggagggggtgttgcacagaagcttggtcttgtctggatgttgccaggagttcatcactggtttagtcctaaaggtgagaaggagtataataggacgaggaatagaagtttaggctgtggggagattttggggcaccggatagtaccatggggttgttagaagcagcaactgcagtatggaatgattggtgatggcctggatgcggttttgtgtgaattgagggactaaatgaaagacaaaaggcccaaataagagaaggagaaaaacaggtaccaggggactaagagtaggaaggagccaagacgcccagttaaaaagtgcccaggtaggtccagcataattatttgcctggctggcgagttttggggccctaactttaagcttttttatgttgtcatatagcaggctggattgatttagataaaaacaacattcttcatttaaaaatatgcagagttctcctttttcagcagtgagtaggtcaaggccttggtgattttggaggacaactgcgactaaggaaccgacctgggcccgaaggactgataaagtttgtgatatatctgtaatgctagcaggaaagtcat

SEQ ID NO: 956776 - DNA, 479 bp, Homo sapiens
gtccttgagtgctgtctcccaaggttgctaaaagcaggcctctggcattcctgataagaaycagaccacatgcagttggctgaagacaagatggactccagcactgacctttcaccaagttttccttataataatcacatcgtaatactaaaaatcacacccagggctggagatttaacgcactaatgagacatatgatgcatgagaaacacatagtcaaactgcgcaggtgctaaaagttccccatccctacatgcctacatgtcactcctttttctcgcctcagcttccttaaaatgacaagagccaagtccttccggagctagcaccaggatccctttcccatacaatgctcccgcgcagttgctccagacgcaagcctatgaaaccttgcctgagtaaaagttctgtttggcctggtgttaatttctttcttttctttttttgtgaggggggtgggggacggagtcttactctgt

SEQ ID NO: 956777 - DNA, 624 bp, Homo sapiens
cactggcatgatctcaattcactgcaacctccacctcccgggttcaggcgattctcctgcctcagcctccagagtagctgggactacartcacgtgccaccatgcccagctaatgtttgcatttttagtagagacggggtttcaccatgttggccaggatggtctcgatctcttgacctcatgatctgcccgcctcggcctcccaaagtgctgatattacaggcgtgagccaccgcacccagccagggttcatttctatttacatgagagccaaaaactagaggtccaagctgggataacaaagccactcccgctgcttagagtaccccactgataataggagttaagaagaaatcacttaggcagatagtaaggatatgggagtcctcggtaaggcttttctttttaatgaaaagcagcccaaaatcattttctaccaaacagcaacctataaagtcaagctgcagatacagacaaacaagctgggagcttgcatggctgaatgtcagcaggaactagggactagggagggactagacatgttcaagatgggggctccatcatcccttctttgccagccacgtgtacagtaaggagcagacaagatggcaccagccaaggaga

SEQ ID NO: 956778 - DNA, 578 bp, Homo sapiens
aattactgtatatattatatatgctaagaatgaacaattgggacataaaattttaaatatgattcaaaataacataaaagtataaagtagttttaaatctctcaaaatatattgcagaatcaatatgctgtaccctgtaaaacactgatataagaaatcaaagaagacttaaataagtgaaaaggtgctgtgtttatggataggaagactttaaattgtgaagatgcgaattccgcaaagctagtcattcattgcaacttaaatcaaaatctcagtcatttatttttgtttttgttcatgtttttattttgagttactgacaggataatttatttgcaaaaaaaaatctgacaaaaaccgtatagaatacctcaaacctcaaaactcaacaataagaaagcaaacaacactttttaaaagaaattagcaatctatttgaacagatatttcagcaaagaaaactttcaggtgtyaaattagtccataaaaatatgctcaacatcaacatcactggtcattagagaaatgcaagttaaaaccacaatgagatacagcatcattactcatcgataaaaata

SEQ ID NO: 956779 - DNA, 565 bp, Homo sapiens
aacactctgcattgataaaagaaaaacttcagccaaattaaatttaaatgagtttaattgagcaatgaatgatcgtgaatyggggagccctcagaatcacagcagtttcagagatactccaggggtgccttgtgatcagaacgaatttatagacaaaaaaggtaaagtgaggtacaagaatcggaagtgcggtacagaaagagtgagattggttacagctcggcgtttgccttattttaacacaatttgaacattccgcagtctacgagtagttgaagtatggctgctgggactagccaacactcagccattgttacaggtgcataccattaagttaggttttcaattttgtctcacaaggttagggttcatccacaaggactcaaatatagaagtatggagtatggagttcttctaaggccgtgtttagtttgctttaacagtacagaatctttatttgtggctgaaatttttgccttaggtttcacaggcactgtatactggcaaaatatttttggtgttgtaatttgggtacaatatagtaagagtggtggtcagcagacag

SEQ ID NO: 956780 - DNA, 765 bp, Homo sapiens
gtctaagatgttataattgcctagttggaggctataggcttgttccccatgacagacctcccagctaaagtggaattcattactttcctggctttttwtgttttgttttgtttttattattatactttaagttttagggtacatgggcacaatgtgcaggttagttacatatgtatacatgtgccatgctggtgcgctgtacccactaactcgtcatctagcattaggtatatctcccaatgctctcccttccccctccccccaccccacaacagtccccagagtgtgatgttccccttcctgtgtccatgtgttctcattgttcaattcccacctatgagtgagaatatgcactgtttggttttttgttcttgcgatagtttactgagaatgatgatttccaatttcattcatgtccctacaaaggacatgaactcatcattttttatggctgcatagtattccatggtgtatatgtgccacattttcttaatccagtctatcactgttggacatttgggttggttccaagtctttgctattgtgagcacaggaaggaatgtttgggaaagcggcattaattgcattacccagtttgaggctgcctgcagctaagactgttaaggcatttcttttgccatgatgtagccacaattgggtttgggcaggtacacattaagggttagaacctttataacttacacacagtggaaggatagtggagtgatatgtagtgttatctggcaccttagtccaatgtgtgcc

SEQ ID NO: 956781 - DNA, 799 bp, Homo sapiens
gtttgggaaagcggcattaattgcattacccagtttgaggctgcctgcagctaagactgttaaggcatttcttttgccatgatgtagccacaattgggtttgggcaggtacacattaagggttagaacctttataacttacacacagtggaaggatagtggagtgatatgtagtgttatctggcaccttagtccaatgtgtgccattattgagagaccccattgggtgtaaatctaaccctcctagccaagcaatcacgttattaaaggctggaaagggagtgtctgcccaagtgacagggcgaaagagaggcagatctaagatatgagcccagtagagtttagcaggtacaggttgcagacaaagcgagagcataaaaaaggaacaataccctaagtgatttgcaatgtacaacagaaagcatagcaagaagcaaattatctggagtgaatggtgtctgtgtcaggagcaggattcattcagcctcctgagttgtcctcttcagcatcccccaggtaatgtccggggcttgtgtcatccgaggaagccacattgtccagggctgcgggtcctgcagggttagttccttcatttctggtaccaggttgggtcctagccacgctgtgatatggtttgatgtgtcatgctggaatccaaagaggacctgagrgtgtgtggacacaagcatactctcttccccacgttaataattcacttggaccacaccgtacattaccgttgacatctttccataaaactgaaggttttatgcctagagaggtttcagcaaagtgctttt

SEQ ID NO: 956782 - DNA, 577 bp, Homo sapiens
cattttaaacatgaataaaaataaagttggtataaatatattaataatcaaagtagacttcagagcaaggaaaatcaccagggataaactgagacatcatgtaataatataamagtaaattcaccaagaagacatacaaatctaaatgtgtgtgcacctaacagactttaaaaatacgtgaagcaaaaatagacaaaactgaaagaagaaatagacatattctcaatatatatataataattctaaaatgtatatgggaagacaaaacaaacaaacaaaaaaccagaatagccaaaacaattttgaaaaaaggagaaagttggatgacttacactgatgttaagatttactacaaagctatagtaatcaatatagtgtggcattggtgaagggatagacatgtagatcagtggtactgaattgagtccagaaattggcttcattcaaatatggccaattgattttttatgaaattgcaaaggcaattcaatggaaaaaggatcatcttttcaacaaatggtgttggaacaattggatatagacatgtaaaaaaaattaacctccacctaaactcatg

SEQ ID NO: 956783 - DNA, 577 bp, Homo sapiens
cattttaaacatgaataaaaataaagttggtataaatatattaataatcaaagtagacttcagagcaaggaaaatcaccagggataaactgagacatcatgtaataatataaaagtaaattcaccaagaagacatacaaatctaaatgtgtgtgcacctaacagactttaaaaatacgtgaagcaaaaatagacaaaactgaaagaagaaatagacatattctcaatatatatataataattctaaaatgtatatgggaagacaaaacaaacaaacaaaaaaccagaatagccaaaacaattttgaaaaaaggagaaagttggatgacttacactgatgttaagatttactacaaagctatagtaatcaatatagtgtggcattggtgaagggatagacatgtagatcagtggtactgaattgagtccagaaattggcttcattcaaatatggccaattgattttttatgaaattgcaaaggcaattcaatggaaaaaggatcatcttttcaacaaatggtgttggaacaattggatatagrcatgtaaaaaaaattaacctccacctaaactcatg

SEQ ID NO: 956784 - DNA, 775 bp, Homo sapiens
tccaaacttttatgctctgcttcccttataaaactgagtatctttaacagcacccaagtcacctgttgaatgctttgctgcttaraaatttcctctgccagataccctaaatcatctctctcaagttcaaagttccacaaatctcttgggcagggggaaaatgcttcctgtttctttgctaaaacataccaagagtcacctttgctccatttcccaacaagtttctcatttccatctgagaccacctcagcctggactttcttgtccatatcactatcagcatttttgtcaaagccattcaaccagtctctagggagttccaaactttcccacatttccctatcttcttctgagccctccgaactgttccagcctctgcctattaccaagttccaaagttgcttccacatttttgggtatcttttcagcaatgcactctaatcttaccaatttgctgtattagttcattttcatgctgctgataaagacatacaagagactaagaaatctacaaaagaaagaggcttattggacttacatttccacgtggctggagacctcacaatcatggcagaaggtgaaaggcacgtctcacatggcagcagacaagagaagagagagcttgtgcagggaaactcccatttttgataccatcagatctcatgagacttattcactgtcatgagaaaggcatgggaaagacctgcccccatgattcatttatctcccaccaggtccctcccacaacatatgggaattatgggagccacaaggt

SEQ ID NO: 956785 - DNA, 611 bp, Homo sapiens
tttttgtatttttagtagagactgggttttaccatgttggccaggctggtctcaaactcctgacctcaagtggtcaatccacccaccttggcctcccaaagtgctgggattacaggtgtgagccactgtgcccagctatgatcacatttctttttacatacatagaaactttttagggttatatgttgttttggaataaaaaaagcaactattcatggtattctgtaatttgataaaacaacctattagtaaattttatttaacttataaaatttgctatagattttttcttcttaaaatgtagttctttctctatgtacacacttgtatgcatgtacatgcatgcatatgtatggaaatcagtcttacccaagtcaggtagactgggaaatcagtcttaccaatgtcaggtagagctttatgtatttttaaaaaataccaatataagcagtgtattattaacatgtttcaggtgccttttacccatgatatttttataatactgctaacatagactatctaaaaagaaatggaaagattcttaytttataagattatttcttattcagggaataaattcattgtcatgtttgaatttaaacatagttcta

SEQ ID NO: 956786 - DNA, 557 bp, Homo sapiens
ccaaggacacagagatgcagagtgtagccctgccctcctggagctcccakcccagtggggagcccggaatggagggggcactgattaggtctgcccttgggggttggcgggccctggcagcttcacagaggaggttgtgtttaggctgagctttggaacactgaggagttcccaggggagcaggattggaaaaggccttttgggcaaagagaacagactgtgcaagggcacagaggcatgcagaccgcctgcagagcacgctcaactgtggtgcacagcagagcagagaaagcaggacatgctatgcaccctcagaaagacagggcctcctctggctgcgtatgggtgggggccagcctgaagctgaagccctggatgggagccattgggggaacaggcctttctcagttggggggaattctgccctgagtttggggccagtagacgcagcagcccctgctggtagaatagaactggaccatccttccctcctggctggccctgcagccacaggccagaagtctggtgttggccttactgccctggagctaaggcca

SEQ ID NO: 956787 - DNA, 571 bp, Homo sapiens
atttttagtagggtgttcctcactgagaaggtagccaaaaacagacctgcatagagtgagtgagctatgtaggtatctggagaagrgtgtttcaggctgaagaaatagccagtacaaatgccacaagacaagaatgaacaaccaggagaccattatgtctggagtgtggtgagatgggggaaagtgggatgtgaagtagagattagggtaggcaggatctccaaggtcttgtacatcattgtaagaccttttgcttttgctttgggtgaagttgggaccacagaagagtctgaactgaacagtcacatgatctcacttacatttaaacaggatcagtgtggcaagcggggaggcaggcagatcacttaggaggctcctagaaaaatccaagaagagatgatggtatcttggaccacatggtagcaacagaggtggtaagaatggtaacattcttcatatatgttgggagtatagccaataatttatgaatgtagtgagtcaatcaataaacatttatcgagtaatcttctatatgccagctacagttccaggtatgaagaaatagtgagga

SEQ ID NO: 956788 - DNA, 492 bp, Homo sapiens
aatcaattgaatcaattgaattgaattttgaattgaaatttgaattgaataattttgaattgaatattaaggatttctttatagatactatattcaagacagcgtagtattggcaggggaatagacacaaagatsaatagaacagaatagagaccccagaaacagacaaatacaaatataacaaattggttttgacaaagttattaacacaattcaatggagaaacagccttttgaacacatggcactggagtcactgggtgtgcataggcaaaaaaattaatcccaacctaaaccttataccttatcaaaaattaactcaaatgtatcatgggtttaaatgtaaaaatataaaactattggaaaaattaggagaatatctttggaacctaaggttagagaagagttcttggacattacattaaaagcactatatataaactaagaaatgattaattcattgtcatgaaaattaaaacttttgcattgtgaa

SEQ ID NO: 956789 - DNA, 599 bp, Homo sapiens
gacaaaggtagtccaatgatcagactatagtctgaatggaactaaacctctctgaagcatttaaaatcatcaatctttcctttgttctgtaaacattttatttcagagatscttatattctcctgggtttccttctgtctcaggtacctcctctgattatttgatggattcttctttatagtcagtaaatgctgtactggctcaacattttctctctctttttctttgcctaggtaattgtgtccaaatataacagctttaaataccatctatatgctaatgactactaaatttatatcttcagtcccaacctcttccctgatttctccagagttatgtaatcaatcacgtacttgaaatgtccacttggatcccttacaggtatctcaaacctagcacaaccaaacaggatccttgattccttcttcacatagtagacttctcatttctacttcttgcccatcttaaacaatgggattaccattgaccaggttgctcagataaaacaatcttaagtattttctttgatttctctctctcagatttgtcatcaacacatcaacaagtctatcatgtttcccttcagaatatcacaaata

SEQ ID NO: 956790 - DNA, 798 bp, Homo sapiens
gaaaactattaaaaaatggaattctggaactgaaaaatagaataaataaagtgaaaacttttttgactgagcttttaagcaaattggacatttcaaaaggaaagatcagtgagtgtgaatctgtatcataaaarctattcaaattatagcccggaaagtaaaaaagactggaaaaatttttagaggccttagaatacaatataaatggacactaaaagaaagttttgaagttcacagcaattattttgtagaatatttctcaatttagatttatctgatattatctaatggttagatttaggttacaaatttttggcaagaatcccacaaagtgtaactatgttcatcttagagcctcacatccagaagtgcatagtattggtttgttatgtgatttttttgtttttaccttgagacagagacttgctttgttgcctaggctggactgaagtggcatgatcacagctcgctgcaaccttaacctcttggtctcaattgatcctcctacctgaacctctcaagtagagctgggactacagtgcacaccaccatgcccaggtaattttttttttttttgtattttttgtagagccagggtttttctatgttgcccaggcttatctctaactcctgggctcaagtaatctgcctagctcagcctcccaaattatgggattataggcatgtgtcactgcactggccagtttggtttcattaactgcggttacttaacaagatagtatcttcccagtttttccattataaggttatttttcctttgtaattaatacataacta

SEQ ID NO: 956791 - DNA, 450 bp, Homo sapiens
ctgcaggcctctgccttacccaaatgccaccatgtcaccctcccttccccaggccaggagttatacttaaggggttagattctatccactgagtttatagtaggttattctcatttctctatttctggaattttcacagcccaaaacttcaaaggaggtaaacttctctgagactgatgtaaattttcttcctgatacttcatgttccatagacacacttccctctaaacaaaaagtacaaatgttcaacatctaactctggtcttaatgcactaagcatggacatcatgattagaaaaacatgggttcaaatcttggttctgtcatttattaactgggtgattttgcataattcagtttctrtaagtttcagtttctttgcctataaaatgacaaatcctaggaagctcatctgagtattgaagcagatagggatgaaaactcttggtt

SEQ ID NO: 956792 - DNA, 557 bp, Homo sapiens
ggacagaatgagaagagagatgtgggtggctaaaggctagaggcatttccagttacataccttgcaaaatgttctgaaaaaccattagcctatggcagtttttcttgtcaggccatttgcattgacccatagacattggttcagtgccttcctgccttgactgtttctttatctttctcttaaacacacatgcacaaatatgtacagcagcccagaaacataagcatcctcgaatggctttgggcagggatggggtgatgggaacacacagataagaaatcaggcccaagcactggtgccttgtgacatcagttggacagtcttgagttttcagtatggtctaaaaccttgtcttcagttctccagggtttataggccttttctgccttaatgccttgggcctggagttattgtgtgattttaattctgaactctaaaacacattgactgactgcctggtttgtcctcctttttgcttgaaccagggcaggatggatagctgttgtgcatttctcttraccgggttatttctaggtgtcacggtcgagagtttaagt

SEQ ID NO: 956793 - DNA, 787 bp, Homo sapiens
tggctcatgcctgtaatcccagcactttgggagtctgaggtgggtggatcacttgaggtcagtagtttgagacragcctggtcaacatggtgaaaccccgtctctactaaaaatacaaaaattagtctggtgtggtggcacatgcttgtaatcccagctactcggaaggccgaggcaggagaattgcttgaatttgggaggtggaggttgcagtgagccaaaatcatgccattgcactccaatctgagcaacagagcaagactctgtctcaaaaaaaaaaaaaaagttatattctagctgggagctttctggggccctccattctagtctacagctatgtctgttctccagatgtatctgatttacagagtgcctgtggtgagtttttaattaaacctggccagtggtaagattaggggtcatgtttgttttgatctcaccgatacagtacccagtgccttgcgctatgtttgatacgcagcagatgctcaatagagttgaatgaatgccatgtttgcccacctaatttaaaaagtagtcaatttttagaaatttggtgggagacgtattaaatttttggtacttttataggcaattcttaactctctgtatggcttatttatttatatgctgttggtggcaaaattgtagttatgagctggctcctccttctgcacatggatgagccaccagattccagggtcagtggtgttagtgagaggatgtaggtaagatgagttaggccaccactgagaggtgtttcccaaattgtggtcttaggagtacc

SEQ ID NO: 956794 - DNA, 527 bp, Homo sapiens
cagatttgtcttgttctttaaattctgtattcctgctgtaaggtcatcaagccattccttcctgtttacgcaggkcggcagtatgtaaataaacaggccctctttttttgcttccactgcctagaggtctcgaaatcagtgtcatggataccagctctttctctggtatgggaaataactattgcagctaggagctagctacacgataatgacctattgtatgataatgaaatctgataacaagagaaaatttaacactttgaatttctaacttttcacatcagcagtttttttcttttcctaaatgactctcacagggagtaaagttctctggaaacaaggaaatgcttcttgttaccatcaaagactaaaaatggatttccccttctcatttctatttcaacaagaaaaggatgggaccattgtttctctactttgcctcccctcccccttcccttatatcctacagggttattgaagtgttccttcagcacgagggtggtgagtttctcatggggacgcagctg

SEQ ID NO: 956795 - DNA, 605 bp, Homo sapiens
actggttctgagccagtgctgagcagctttaggggaaggagggagagtagsgaaagaagggcacttgggcactggaagatggaggcagcaaggagttgacagaagagaaaaaccctgacctggaacctagaaaattgttgcagccttttggtgggccccaatattccgggttcagaaaatgcacacttgggaaaagtaatggtatttatcctgtttgcaccgactaaaattctttctcctttgataattagggtttttgctttaatgctctcccatgggacaggtggcttacgatggcttagattggcattttcaagggaaggaacgagtctctggaggtggcctcaagggatgtgttaagaacttaccttatcactgtggggccctgagagttgttccttctgagcctctctcagaggattttgtggttaaactccccaaagtgtccattctgtctctactatttcaccctgcaatctctcctgaaccccatccaagctgaggttcttcccccaatccaccaaaactatctttgtcaatgtcaccaatgaccaccatgctggcaaatccattagcacattctcatcttcctttcaccatagctt

SEQ ID NO: 956796 - DNA, 759 bp, Homo sapiens
ccaggtccttggagccccccgcatggcccacccggccccatttctccacytggctggctgcaggtctgctggttccctggttttataaactccattttccaaggatgtgaaaacgtagcaataggtcccactatataatagctcttacttgctttagcctctgtgtgtgtctcgagatgtacattttttatactatatattaggcttctcccaagaagcagaatcaatagaggggtggagggtatacgtgtaagaaagagatatatttttcaactcatgtgattgaagagtgacaagtccaagatcttcagggcagcctggagccccagggaagagttgatgctgtgcttaaatagaaggtcacttttttttttttttgagacacagtctcgctctgtcacacaggctggagtgcagtggtgtgatcttggctcactgcaacctccacctcctgggttcaagtgattctcctgcctcagcctcccgagtagctgggattacaggtgcatgccaccacgcccagctaatttttgtacttttagtagagatggggtttcaccatgttagtcaggctggtctcaaactcctgatctcgtgatccgcccgccttggcctcccaaagtgctgggattacaggtgtgagccactgtgcatggccagaaggccactttttagcagattccctcttctttggggaaggtgggtcttctgtctcttaaagctgtcaactgattggatgaggcccacccccattgtgaa

SEQ ID NO: 956797 - DNA, 643 bp, Homo sapiens
agcagggacagtcctgagagctgtggacacgccacacccrctgttgggcctggttaatgccattgaacacctgagcaagggcaggcccagggaggctgaataagtctagattcccatgttgagtaattaaaagaactgacttttaccagatgaaggccagtttcaaagttgggctgcttctgtgttaccactgcccttttgctgtggtctgaatgtttgcgtccccacaaaattcatatgttgaaacctaacccccagatgatggaattaagagatgaggcctttggcaggtgattgggtcatgagggcatgagagtggagcctgcatgaatgggattagtgctcttacaagagaggcccaaaggagcttgttggccccttctaccatgtgaggacacagagaaggagacaaccagtccttaccagataccaaatctgccagcaccttgatcgtgggcttcccagcctccagaactgtgagcaatacatttctgctgtttattaattacccagtccaaggtgttttgttatagcaggctgaaggaccaagacatattcccaggttttcattccgtgatctcagaatctttccacaagcaagcataggttatcgtttcttatatgcctttttgtaaaaatcagg

SEQ ID NO: 956798 - DNA, 416 bp, Homo sapiens
ggccctgttctttgtacttatgataaaactgtctttgcaaaattataactgaggaaattatgacagtcaaagaaatcatatctacctgactccatcttgcttctaayctttaagctgtctttgtccattcttgggcataagctgaagtaactttgggaaggaattcagttcatggtttgactctgaaacaaaattaatagcagctctttcctgaagagaccccccttttgcctagggaccagtctgtctttgcaggactaacaaattagctgcaagattagaaattactgtttaggggtcatgcagcctctgactccaagagtataaaccttcccaaattggccccggggataacatcactactgtaaaacctaagatcagtgcttgagatattttgcagaccctgcactagatgg

SEQ ID NO: 956799 - DNA, 570 bp, Homo sapiens
tgcagccatatggatagacctggaggccattatcctgagtgaattaatgcagaaatagaaaattagatactacatgttttcacttataagtgggagctaatcattgggtactcatggacataaatatggcaacaataggcactgggaagggagaggagggacaagggttaaaaacctacctattgggttctgtgctcactgccttggtgatgggatccataccccaaacctgagcatcatgcaatatacccaggcaacaaacctgcacgtgtactcctgaatctaaactaaaagttgggaaaaaaaatgaaaaaaatagaaatggcttcatgaatttggacaatctgatggcttacatgcatgaggtagaaatgccagaagtttcataggatagtgttgagaaataggtcacaaggcccaaagtagtagcaaagacagcatgaatttaccaggtaacggctgagaaccyaccacctcactatgttttcagaggatacttttttctgtaaggtactaaataatgcatgggtgtggggtacttacgcatctttgagaagcttggggatggtt

SEQ ID NO: 956800 - DNA, 554 bp, Homo sapiens
ggactcgctttgttcatttttgagaaaatatytgccaaactcctcagtctcaataaccacagtttgtcaattgttctttcaagtaaaggtagtgttccacagaaaaagcaactagttgatactgcaattgaaacaatcacataagtgcctttctcttgaaactgacacgcattctgctttggcatacagtagaagtgcctgaaatgcagttctcatatcactcagaatagttaaaatggcatgtaccaggggtcagagtttaatacgcttaataattgttactgcttcatcagatattcctaagtggaattggcatttaaaaatttaagtgtgtggcagtgaagaatacaataactgtaagtacaatttggtgccactgccttgatcatattaaggtgcaattttacttaccattgcttttgcaccattagtgcaaatgtcaataagtggagaaaggtaaataacttcttagtatttttataaaaatagtttcgacctcacagagctcctgaatgtgtcttaggactccccagagatcaggggccctactttga

SEQ ID NO: 956801 - DNA, 544 bp, Homo sapiens
cagtgtggcagggagagccagggagggagtgctgggtagggagatgtaggagagggcagcagggccaggcaagcaagaccttgtaggacttattaaggagtgtggtctttatcttaagatcaataggargcaactaatgtacttttaaggaagaaaatgatatgaacagagttgtgttttgaaatgcgctctggctgctgtgtggagaacaaattggaggggagccagtgtggatataagggtaccagggggctcttgtggtaccccagaaatgtgaagatggtaccatgaactaggatgatgctggtggagatggaaagaagtgaaagatttgagagatatttacaagctaatatcaacaagatatggggacggattggatatgggttttgagggagagaggtgttgaggatgactgccaggtctgtctgccttgtgcagctacccagacgaaggagtcattcaacgaaatctaaaatacctgaagaggaccaggtttcagtaggatgaagaactacagaaattctgttttggacacattgag

SEQ ID NO: 956802 - DNA, 583 bp, Homo sapiens
ttttggagatggagtctcactctgtcgcccaggctggagtgcagtggcacgattctagctcactgcaacctcygcctcccgggttcaagcgattctcctgcctcagcctcctgagtagctaggattacaggtgtgtgccaccgcgcccagctaattttgtatttttagtagagacaggtttcaccgtgttagccaggctgatcttgaactcctgacctcaggtgatccgcccacctcagcctccctgacctcaggtgatccgcccacctcagcctcccaaagtgctggaattacaggcgtgagccactgggccctgccgtgagccactgggccccgccagaaattgacatcttaaacaatgtgtaatattctaatcaatgaacagagtacatctctctacatcatacaaactgtctttaatttctctcagcaatattttgagtttttagtgctggcatcttgcacatcttttttagatttattcctagttatgatttcatgcaaatgtaaatggtgttttttaatttttattttctgttgttggtaatacataaaaaatacaagtttgatattgtatccagta

SEQ ID NO: 956803 - DNA, 541 bp, Homo sapiens
cttttgacgtcatgatccgcctgcctcggcctcaccaagtgctgggattacaggcatgagccgccrcatccagtgaaacatttcttaaatagaaatgaagtcaggtctttactgagaaaaagttaactctgacttggctgattgggttgactgaaagcactgtctttgccaattaggttatagagtgagtatttttcacaaattaagtaagtaaaagctggagcttcaagctttcaacaaaacatatttgaagaataaaaatattttattaaaacttgtattggcaatgaaataaataatattttgattttcccaatcctctctgaataattcgggtgactcaaggtactcttaagtgaaaaagtagtggttgcaattaatggttatttgataagtcttggaaaagtacttttggaattttttccagaaattgagaaagtaaatgaacacctctaaagattgggtaacaaatgattctgcaagtcaaggcttttccaattctttgcttttgtcaatttagaagaggaccaatttagaggag

SEQ ID NO: 956804 - DNA, 715 bp, Homo sapiens
ctggtgagaaaaattgatgcctcagacaatatctacaccacagagtccaccacagggaacctgttcagcctgacccaggagggggctcccttgtgccgcatcatagccaaggtgagcttcatggttagggaccaaaatggcaggcctggggaagtatgaggaagctcacttgttcaatgggaatagctggctcacgaggtctgtcttggcccctgcattagctgctgagtctccttgggagagtcacttatcctatctgggacttggtgtgtgcatttttttttttttttttttgagacgggagtctcactctgtcacccaggctggagtgcagtggcgcgatctcggctcactgcaagctctgcctcccgggttcacgccattctcactgcctcagcctcccgagtagctgggactacaggcgcctgccaccacgtccggctaatttttgtatttttagtagagacggggtttcaccgtgttagccaggatggtctcgatctcctgatcttgtgatccgcctgcctcggcctcccaaagtgctgggattacaggcgtgagccaccgtgcccggccggtgtctgcatttttagtaggtggctagcccctctgatttcatttcccacttgagacagaaatctggtgcccccagagcytctatcatctttctttatgggtatatgttataaatatcaaccgtctttctccatctcca

SEQ ID NO: 956805 - DNA, 704 bp, Homo sapiens
aaggctaaagggcactggcataccacatttgaagtgctcaaagaaaaaaagtgtcaagaatcctatagccagtggagctatctttgaaaaataaaggtaaaataaagrgattcccttatgaacaaaaactgtgaaaattttgttactaacagacccactttaaaagaaatactaaagaatgcttcaggaaaaaagcaaatgcaataattcaatgtttgaaattattcatcatcaggcaaatgcaaatcaaatctacaatgagataccatttcacacctactaggtataatcaaaaagttggataatagtacgtattgatgaggatgtagagaaacgaaacatacgcaaactgctggtgagaaggtaaaatgattgtattagttcattttcacattgctataaaaacttccctgagactgggtaatttatgaagtaaagaggtttaagtgactcacagttccacacaggtggggcggcctcaggaaacttacaatcatggcagaaggggaagcatttaccttcttcacaaagtggcaggaaagagcatgaacatgtgaaggaggaactgtcaaacagttataaaaccatcagatatcatgaaaactcacttactatcacaagaacagcatggggaaaaccacctctatgatccagtcacctcctaccaggtcccttccttgacacatgaagataatggggattac

SEQ ID NO: 956806 - DNA, 607 bp, Homo sapiens
tcacaaagtggcaggaaagagcatgaacatgtgaaggaggaactgtcaaacagttataaaaccatcagatatcatgaaaactcacttactatcacaagaacagcatggggaaaaccacctctatgatccagtcacctcctaccaggtcccttccttgacacatgaagataatggggattacaattcaagataagatttgggtggggacacagagccaaaccatatcattctggccctggcccctttcaaatctcatgtcttcatatttcaaaacacaatcatgtcttcccacagtccccaaaagtcttaactcatttcagctttaacccaaaagttcaagaccaaagtatcatcagaaataagtcaatttccttctgcctagcagtctgttaaataaaaaacaagttagttacctccaagatacaatgaggattcaggcattggataattgattccattccaagtgggagaaattggccaaaacaaaggggctacaggccccatgcaagtctgaaattgagcagagtagtcattaaatcttaaatcyctgagataatttcctttgactccatgtatcacatccagggcacagcgatgcaaggggtgg

SEQ ID NO: 956807 - DNA, 599 bp, Homo sapiens
ttcaggcattggataattgattccattccaagtgggagaaattggccaaaacaaaggggctacaggccccatgcaagtctgaaattgagcagagtagtcattaaatcttaaatccctgagataatttcctttgactccatgtatcacatccagggcacagcgatgcaaggggtgggcttgcatagccttgggcagctgtgctcctgtggctttgcagggtatgccccgctggttgcttttatagctggcattgagtgtctgaggcttttccaggaacatggtgcaagttgtcagtgaatataccattctcagttctggaggacaatggctttcttctcacagctccagtaagtaatgccccagtggggacactgtgtgggggctccaaccccacatttttcttccacactgccctagcagaggttctccatgagggctccactcctacagcagacttctgcctagacatccagcatttccatacattctcagaaatctagacagaggttcccaaagctgaactcttctgtkcaccctaaggcccagtattacatggaagccatcaaggcttggacttgtaccctctgaatcaatggccc

SEQ ID NO: 956808 - DNA, 630 bp, Homo sapiens
gtgtatgtgtgtatgtgtgtttaacaaattgaaggttcatggcaattctgcatcaagcaagtatattgacaccatttttccaacagcatgtgctcacttcatttctctgtgccacattttggtgattacttctaacattttcattactattatgtctgttacagtgatctgtaatcaatgatcatcaatgtcactattgtaatggttacaaacttagcccatatgagatgggaaacttaattggcaaatgtgtgtattctgactgctccacagaccagctgttactgcatttctctccctctccacatgtctttctattccctgagacaaaacaatattgaaattagtccaataataacccttcaatggcctttaagtgttcaagtgaaatgaagagtcacacatctctcactttaaatcaaaagctggaaatgataaagcttactgaagagggcatgtggaaagctgaggtaagctgaaagagaggcctaatagacaagttgtgaaagttaaaaaaaaagttcttgaagaaaattaaaaatrttacttcagtgaacacgcaaatgagaagaaagcaaaatggcctcactgctgctatggagaaagtttcagtcatctggatagaacaga

SEQ ID NO: 956809 - DNA, 612 bp, Homo sapiens
aaaaaactactttaaagttcatatggaaccaaaaaagggcccacattgccaagacaatcctaagccaaaagaacaaggctggatgcatcatgctacctgatttcaaactatactaccaggctatagtaaccaaaacagcatggtactggtaccaaaacagagatatagacgaatggaacagaacagagccctcagaaataataccacacatttacaaccatctgatctttgacaaacctgacaaaaacaagcaatggggaaaggattccctatttaataaatggtgctgggaaaactggctagccatatgtagaaagctgaaactggatcccttccttacaccttatacaaaaatcaattcaagatggattaaagacttaaatgttatacctaaaaccataaaaatcctagaagaaaacctagacaataccattgaggacataggcatgggcaaggacttcatgtctaaaacaccaaaagcaatggcaacagaagccaaaactgactaattaaactaaagagcttctgcacarcaaaagaaactaccatcagagtgaacaggaaacctacagaatgggagaaaatttttgcaatctactcatctgaaaaggg

SEQ ID NO: 956810 - DNA, 663 bp, Homo sapiens
agcactaaaagacattttataagcccaggctggctgtgagtgtcatgaggactccaagactgatgtatcttttggggccagatggacctggggaagaccaaccaagggcctgagttgygtgggaatgctgtccgaggatcagagaccagcagactgtcctggtgatccaagcaagcatgtttcccagcaggtctccacatgagttgggtggttccctgactgtagtgaaaggtgctggagttgcgactgggccccttcaggatctgctttgagaaggaggctgatggccctgtgtaattggccctgatgggcatacattacccagcaggcccccgcacaagttggatatttcctctgttttaacaggagaggccagaactgagactgagaccccttggtatctgctatgggatagaagctgaaaagtattgtctctactcagaagggtgcattttgcctaccaaattcttaaacagatagcatagtttctgattgcagcaggcagggactggagctgagactgggtcccctcaggatctgctgtgggatgaagctggagatcctcatctctttggttcagaggagcacgagtctcccagcaagtccctgtgcaggcaggataggtctctgcagtataaggactggagctgggtctatacccct

SEQ ID NO: 956811 - DNA, 676 bp, Homo sapiens
taatcacaacaaatatattgtgtagatagataggcagacagayatagacagagtagatgatgactatctatctatctatgtttctatctacgtatctatgtatctgtctatgtatctgtctatctatctatctgtctgtctgtctgtctatctatctgtctctgtctctctctctctctctctctacctacctacctacctacctacctacctacctacctacctacctacatgcctacctatctacatacctctctatatctatctatcaccagaagaaggagacagtagtaagcaatgcactgtagtaaaagaagatctagctctggagtcagatagatggggtttgaatcaccattatctatggcacctactagtgaggtaacctcaggcaagttacttaatacttctaaatcacatttacccttttgtaaaataaagaaaataaaatctcccaggatgagttgttttaagatttaagagtataatctaggtgagctatatattttccctctaggagcttctgtatttactaagtcagtgtctgtgtgaccttatagaacataactaccatgaataatgataatcaactctgtgtatattatacatataaatttatatatgacatttatctccttcaggatgttacctatgcctgaatagaatataacaccgt

SEQ ID NO: 956812 - DNA, 752 bp, Homo sapiens
actgacactgcccgattgcctcagaagcctacaggaccatcacagatgctctaagtaactctcacagtagaaagtaagtccatccccttcttaatcaatacagaggctactcactccacattaccttcttttcaagggcctgtttcccttgcttccataactgttgtgcatattgatggccaggcttctaaacctcttaaaactccccaactctggtgccaacttagacaatactcttttaagcattcctttttagttatccccacctgcccagttcccttattaggaccagacactgtaactaaattatctgcttccctgactattcctaggctacagccacacctcattgccaccttttcccccagttcaaagcctccttcacatcctccccttgtatctccccaccttaacccacaagtataagacacctctactccctccttagtgaccgatcatgcaccccttaccatcccattaaaacctaatcacgcttacctcgctcaatgccaatatcccatcccatagcacgctttaaaaagattaaagcctgttatcactcgcctgttacagcatggccttttaaagcctataaactctccttaccattcccccattttacctgtcctrgaaccagacaaggcttacaggttagttcaggatctgagccttatcaaccaaattgttttgcctatccaccccatggtgccaaacccatatactctcctatcctcaatacctccctccacaac

SEQ ID NO: 956813 - DNA, 721 bp, Homo sapiens
tcccctttatggcgagttaattgttacttgctttgcctccaggaggcggggggctcttctcacttcaccagtcctggggaacccatgtgagaaaaactagaggcacaaatgmgcccacagcaaaccagagggtgcggtttgtactgcccggccttggttcacagttcaaaaggcttcttggaaaaccactgccccggtgcattcaagtgtttgtttacagctcattaactacttgatggaaaggttggggtgggggaaatattgacagaaaatcaatcagaaatgaagattaacgatctccaaaatattcctgtgggtccatagggaaatgggacttaagttctaaaaccagggtctcataaactgagatattgtttctccatttgcctttgcgcagagagaggtcaccaggaatcaggttgtgacgagtggccacacctgcagggaatttgagatgggcctccaagggaaccttttagctgtaaggcctgttcctcctggcctttgttcctgtcagcaggcagagaatagagaagaaactcaggttggttcacttcaccaccaccgtgagactgggcaagctgggaccaggacagggtcccacgggtgccttcgctgcgtcccatgcctctgttcctgttttattaactggatgagatcaggcttcccaggtggagctggaagggaaaggcaggcaggtattttcaaataagcccatggg

SEQ ID NO: 956814 - DNA, 600 bp, Homo sapiens
ttgggaaattttcttcaccagccctttgaacaagtcagggtaggaggggaatggggcttggagaataagacaagaatgacaaggtatgtgtacaattaaactcatagtgaagaatttctcattcrttagaaagcttgatggagaaaagtaacacaacctttagagaatttgaaccactgctctcctgggcccatttcacagtctaggtaaagtcatgggaaatgtatgtccctgtgaagcaattttacttcaagaaatgaacacatttttcacataaattaaagcttttcctatttaatgtccttccttttcagttgttttttcttttttctttttctgatacagaattttattctgtcacacaggctggagtgcagtggcactaacagggctcacagcagcctccacctccctaggctcagatgatcctctcagctctgcctcccaagtagctgggaacacaagcacatgctaccacggctggataatatttttatgtttgtaaagacaaggtctccctatgtttcctaggctgtttttgatattctgcactcaagcaattcacccacgttggcctcccaaactgctgggattacagct

SEQ ID NO: 956815 - DNA, 729 bp, Homo sapiens
gacaagggtgtgagatcaggtttcccaaggagcttttcttagttctgcaagttgagcttgactccttaaagggaagcacatacccttccagtcaaagccttagtaagacaaccagtttctccaattgcatcctgttgtgaacatcactaatcattggagaaatgcagatcaaaaccacaatgagataccatctcacaccagtcagaatggctattaccaaaaagtcaaaaaataaaagatgttgaggctgcagagaaaaggaaatgcttatacactgtgttagtgggaatgtaaatttattcagccactgtggaaaacaatttggagatttctcaaagaactaaaaatagactctcatttgacccagaaatcctatcactggacatatatccaaaggaaaattaattattctaccaaaaaaacacatgcactcatatgttcatcatagcactgtccacaatagcaaagacatgaaatcaacctaggtgcccatcaatggtggattagataaagaaaatgccatacatatacactatggaatatgacacagccataaaaaattacaaaatcatgttctctgcagcagcacacatggagctggaggccattatcctaagccaattaatgcrgaatggaaagtcaaacaccacatgttctcacttacaagtgggagcgaaacactgggtacacatggacataaagatgggaacaatagacacttcaggctac

SEQ ID NO: 956816 - DNA, 719 bp, Homo sapiens
tgagaacagcatgggggaaactgtctccgtgatccaatcacctcccaccaggtccctccctcaatacatggggattataattygagatgagatttggatggggacacagagccaaactatatcactgtcctaggtcagtttcctagaaccagagctaagatgggaattcttgcgaaccttattgactggggaagcattgccctttgaaggagagtgagggaacaggatagggcaagggaagcaagttaagcaagggtctggtcctcaatggagactggctccagcccagtcccatggggcgctccagaacacagaccgcacctcgtagttgtcccatcttgacacaaggggagtggcattttgtgccctgtcattgtacccaagcaaaggttatcctctgctcacaaactgctacctgcagaagcaggctgttaatatgtgtcaggagtagccccccaggcaagataatccccctatgccaggacagttgagtggagcagctctcagcccctagcagccaacactcacagcagaccctcagcaatcaattcacatccccaggagattcaagctagagcaagatggcttggccaataaagctgaagaaagcctcaaatcgacatacttttccttcttctcccatggggaactagactaactcagcagccaaccaagacaaaagggttctttatggagtggtgtcctcataatcacatttg

SEQ ID NO: 956817 - DNA, 582 bp, Homo sapiens
agcctcctgaatagctgggattataggagcctgccaccacacccggctaatttttgtatttttagtagagatggggttttgccatattggccaggctggtcttgaactcctgacctcaggtgatctgcccgccttgacctcccaaattgttgggattacaggcataagccaccgcgcccggcctcccaaatgtttcttgacgctggtccctccctcttttccagcatccagcaatacccttttgctggcattcaagtcttcccatgacgtggtctcctccaatgtctctagccccccaccccctactcttagcctcaactttatgctgtgctgatagtgagtgagtagagctttgcctcacacgcctgccttgcccatgtgcttccttcaccttcccaccttgcctctcctcctctaagctgcacttgtccagttcagtgtcatctccatgaacgtcttagyagacgcccaggttgggcacaatgcccttccctgaacttccatagtgccctctgtgtaattccctagctcattattcagacattgtctttgtgtcttctaggttaggagtcccttcatctt

SEQ ID NO: 956818 - DNA, 652 bp, Homo sapiens
tgttagaaggaaaactaacaaacagaaaggacatccacaccaaaacccaatctgtacatcaccatcatcaaagaccaaaggtasataaaaccacaaagatggagagaaaccagagaaggaaagctgaaaattctcaaaatcagagcgcctcttctcctccaaaggaatgcagctccttgccagcaatggaacaaagctgagcagataatgatttgacgagttgagggaagaagacttcagacgattggtaataacaaacttctctgagctaaaggaggaagttcaaacccatcacaaagaggctaaaaaccttgaaaaaagattagatgaatggctaactaaaataaacagcaccaagaagaccttaaatgacctgatagagctgaacaccatggcaggagaactacgtgacaaacgcacaagcttcagtagccaattcgaccaagtggaacaaagggtatcagtgattgaagaccaaatgaatgaaatgaagcgagaagagaagtttagagaaaaaagagtaaaatgaacaaagcctccaagaaatatgggactatgtgaaaagaccaagtctacatctgattggtgtacctaaaaatgatggggagagtggaaccaagttggaaaatactcttcaggagaacttccccaa

SEQ ID NO: 956819 - DNA, 546 bp, Homo sapiens
aatggatgagtttattaggtgctttcccatgaataggtgaagactggaaggaggaacagagggagcatgagacacctggtcttccaggaagaggtaccagtaagactctgctacacgtcagagggaatccaagcaactacctagttcagaagttccaatttacaccccacaggccaattctagcctgttttgttggtctaaagtagtatctaatttaaaaaatctgaatttgatttccttaataagactatgatccctccagttcatcgcagaccctatcagtccacagtctcacatcagtctgcttcatttgttcagggcacctggcctgcaggtatgtgagttgttgacatctgcattctagtccagttttccattacatgcaaaagccctttcaacaacattatgtattctttatttattcatacattcattaaaaaaatatgtgctgaacaggtactacaagyaggctcataaatgcacagaattttagagcaggaagagagcttggagttgttctagtctgacctgctcctgaatgactga

SEQ ID NO: 956820 - DNA, 622 bp, Homo sapiens
ggttacacaccaactgctgagagcaagttgaatgacagtaaaaggtggtgaaacaacaacacaacagcagcagctacaagagccgccttggacctggaattggcacactgcagtkgtcaccggcctagactgaaccggtttaaatttcactctgccttttcttactgatgccattttgtagacttaccgaacctttctaagcatcagttttctcatctggaaagtgggaataacaatattccctgcttttcagggttagtgtgagaattagaaatcaggtaggtagctactgctgagggccaggcatatagcaggttcccaggtactggtagatactgttatttctaagacctggatgtaaccaatgctgatgctcactagtgctggataggacagtcacatcatcatttctgagtatcagtgttcgttctcatctctagaatggagacatgtgatgtttccacatggtggttgtgaagatgaactgaaatataaacagcctccagcatagcatttgccaaatgcaaggccttagtaaatgtcagtaggatctgaaaatccaatggttggagaataaaatctcccctttagctatgaatttatttccatttcatctggagtc

SEQ ID NO: 956821 - DNA, 648 bp, Homo sapiens
ctcgcttgattatatcaatgaagtgtatattgccccctaaatgcctgattgatccaattagctgaagactaaaactttttataccatgatgtaactaaggggggttgggggaatcttgaatatattaaagtcaatcccaatgcagaccgaaaaaatttaaaagaaacctgatagagaaaaagcaaattagaacagttagatttacccagtcatacatatattattcacatttctagaaggaagaattgtttttgggacaagtaggctcctaagtggtaaagagctgttttggtaaatctgtaggtaatactaaatatgtagagagtgaataaaatataggattgtatgagagatcaataatataaaaataccttatcacttttaaatcactaaaatgcagcaaattaacaaaatactccaacaaagtatacattgacagtatttagcacagtaaatcagtatgttttcatataagcagatattggatacaactagctagacaaatttctaagtrtattggttacaaaaggcctttaatctgagtcccagctactggtctaacatctcacaccttcttcctacttatccaactctctacccctattaaatggcttatagtccattcattccacacttatttattaaaca

SEQ ID NO: 956822 - DNA, 598 bp, Homo sapiens; identical to SEQ ID NO: 956765

SEQ ID NO: 956823 - DNA, 557 bp, Homo sapiens
agagaagtctttctgatagctgggatgccctttagaaagtgcacccaagtccatcagtggatgagagtggaacgcttttcctcagcgagaagccycaagagaaagcagtttgtgtccccagcggacattagcccccagaggttggctcatcattttccagtcccaccatgggacaaatcccatctgttccttcagactcacctctgcattgcatcctaaaacattgagacaaatttaaccctcagactctcaaaaagaaacatctacttttcttgtgtaatacagcgtggtccctatgcaaagaatcctcaacttggcctcctcgatcttttataaccaagagcagaataaggaggccagggctaaggagaaagaaaaatgcagggaagaaaggcaggctcaattgttggctgatttagaagccctcagctccctccaggttgccctaaggacactcctccaggtaagtgccctcagtgcagatggccaggccactggaaggcaaactgccccaatgggatacatgggaaaaagccccgcacagcttgtaccctctg

SEQ ID NO: 956824 - DNA, 588 bp, Homo sapiens
ttgcaacatatgggatatctttgacagatatttaagaaaatccaaagtcaaggaaaggggcaaaaaaaaaaaaaaaaaaaaagaaactagaggaattggaagccctttagcattcataaaaacagcaaacattttaagaagtcccattcatagccagtttagtcagttttcacactagaggcctatctatctcagatcatgttacttgatacattgtttgtttcttttaactaaagtttacaaggcaagccaaatgcaagaggaaaaaataaatagtcttaagagacaaaacatatcagaaccaggttatgatatgacacagatgatagagttatcggacaggaaatttaaaattattatgattaagaagttcagaactttaatggaaaaagtagacagcatgcaagaagggaagggtaattcaagcagagagatggaaaccctaagaaagaattagaaggaaatgctagaaatcaaaagcactgtaagagaaataaaaaatgcttttgatgggttaatcagtagattgracatagcaaaagaaatattccatgatcttaaagataggtcaataagctttaacatagg

SEQ ID NO: 956825 - DNA, 613 bp, Homo sapiens
cttaattgttagacagctcagtggggcatcagtgtgacttttttttttttgagacggaatctctctctgtcgcccaggctggggtgcagtggcgcgatctcggctcactgcaagctccacctcccgggttcacgccattctcctgcctcagcctcctgagtagctgggaatacaggtgcccgccaccaccccagctaatttttttgtatttttagtagagacggggtttcaccgtgttagccaggatggtctcgatctcctgacctcgtgatctgcccacctcggcctcccaaagtgctgggattacaggtgtgagccaccacggctggctgcatcagtgtgatcttttgcacccacacccgagttcttgtccggcatcccggaggaatgaggttgcaggaacaaactgaagggtggtgaaagcggaggattttattgccgatgtgaaagaggctctcagtgggaaggggagctggagaggagatggagcrggaaggtcatcttcccccagagtccagttgttcctgactggactcctttctgaaaaaatgccatcaagctgtcccccatgaagccaagctgcttctctcccatgtcgaactgcagtctccga

SEQ ID NO: 956826 - DNA, 613 bp, Homo sapiens
cttaattgttagacagctcagtggggcatcagtgtgacttttttttttttgagacggaatctctctctgtcgcccaggctggggtgcagtggcgcgatctcggctcactgcaagctccacctcccgggttcacgccattctcctgcctcagcctcctgagtagctgggaatacaggtgcccgccaccaccccagctaatttttttgtatttttagtagagacggggtttcaccgtgttagccaggatggtctcgatctcctgacctcgtgatctgcccacctcggcctcccaaagtgctgggattacaggtgtgagccaccacggctggctgcatcagtgtgatcttttgcacccacacccgagttcttgtccggcatcccggaggaatgaggttgcaggaacaaactgaagggtggtgaaagcggaggattttattgccgatgtgaaagaggctctcagtgggaaggggagctggagaggagatggagcaggaaggtcatcttcccccagagtccagttgttcctgrctggactcctttctgaaaaaatgccatcaagctgtcccccatgaagccaagctgcttctctcccatgtcgaactgcagtctccga

SEQ ID NO: 956827 - DNA, 732 bp, Homo sapiens
gtgctgagtgcgactctggggaaggtaaggaaatgacagccagtgttaaatgattctgaagcaagatccttcagatttcatatagggaggtattattagaggaaagaaaaaaaatmagaatttcagcttttattatcaaatatcgcataattattcagaagtcaacaaataacttgttgaacacttactgggtcccaaacacttgtcttaaatgctggggataccgcactaccaaacagacacgaattcctgctctcatggaacttgtgtttttgttgagtgtgtttagttttgttatatccttgctgaaaagatagcaaatatttgaagttagttagttagttttgtgctggagcaattgtctccagaataaggaaggaaggacagaggggaggaagggagagaggaggaaagacacggagggagggaaaaagcaagggatggaggaaaaacaagaaatagatactgaggtacattttgactttctcaaatggtctcttcccaacttccccaggtttacttccttggaagcacacagaaataataagcctttcatgggagaactaatttcccacctgattttcctaccaggtggctaagtcacaggtgtttaagtcacatgctttcaggttaggcttaaaaaaaatacctccccctggagctgctaagccaaggagtcctctgctcctcattgtgccattcgactctgtggccattagaaacacgtttctg

SEQ ID NO: 956828 - DNA, 429 bp, Homo sapiens
atgagtcaggaagtagactgtattttactgggctcagggccaacaacctcattcagtggcctccaaaactaaacactttgttgagggagaagagaaatcgctycacaagaggtatagaaaggactggaatctccgcttacagagctgtggactgcccagagcttacagcagggtcagcaaattttttctgtaaaaggtcaaatagtaaatatgttagcttttacaggccgtatggtctctgtggcaactactcaactctgtgattgtagcatgaaagcaactatagacaatacctaaacaaatgagcgtgggtgtgcttcaatcagatcttacatacaaaagcaggcaacaggccagctttggtccacaggctgtagtctggggactcctagtttagagtactgttactggcacatcacaggcacacaa

SEQ ID NO: 956829 - DNA, 594 bp, Homo sapiens
gctgccagacatattggttcttctttaaatgcagtttcctttctctcactgcttttgggatcttttccttatttttgacctttggaagtctgaytattaattgtcttgcagtagtcttatttgggttaaatatgcttggtgttctacaaccttcttgtgcttgactattaatatcttttcctagggtttgaaagttctctgttattattacatcaaataaatattctaccctgatctctgcacctcctcgttaaaaccagtaactcttagatttgcccttttgaagctattttatagatcttataggcatgctttattcttttttcttttatctcctctgactgtgtatttcttttgcttgatcagttctgctgttgagagactctgatgcattctactgtaggtcaattgaatttttcagctccagaatgcctgcttgaatctttttagttacttcaatctctttggtaaatttatctaataggagtttgaattacctgtgtgaaagatcgcatatctctgttactctgggattggtcactggtgtcttatttagtttgtttggtgaggtcacattttcctggatggtcctga

SEQ ID NO: 956830 - DNA, 626 bp, Homo sapiens
aggcccaacagtttccatctctttgcctggttcccccatcttgtaccatgggactagtgagagcacctgctgtggggctatgaggagcaggagttagcatgtgtgcagtgcccaaatatgcacatggtgcacagaaagtaagaggcagacactgctgttaccttgggcagggccatctctctggagcagggtctcctgctccatgaaagccttgaacccaggcttcttagcagaggtagtacacacccccaccctgccaagtgggggtgtgtgtgagcacttcctgagggcttggcttcctggtgttccaggctgttgtgggacctcagggtagtaagggggtctcacataactgctttggaaggaggtgctgggtctgccgggctgccactcactctggaagtctggccccctgcatgtggtgggtattattttctcgataagactccagcccctgagccagactccagtgctgaccccagtccctcccagaggcagccagtggggatctggatctggtgtccagtttggccacatgctgcctgtgcatcttggaggggtcaccagtcccctctgtgcctcaaaggtatggatgcccmtgctgctggttattgtgaggaccaatt

SEQ ID NO: 956831 - DNA, 542 bp, Homo sapiens
aagaattctaagatgacccaccaacattcccagccattggtgtacacataccttctcccagttattcaatctaggtactgtggtgaaggggtttgcagatgtawttaagttctccaatcaattgacctagaaatagggattatttaggcaagcctgatctaatcacatgaacactttaaaagttttctcaggctttccgagtcctggcccacgggcgttgggtatgagcagcgccctccgccctccgccctaagggttcgtggcccaccgctccttcgcagtccctgccgccaccgtccacgctctgcgttgtagagaagacagtgggtcggaagagcgccatcgccgccagtgtatgtggggccctttttatcaggtactgcatctacttttaccacaaaagacgaagtgaccccaatttcaagaacaggcttcgagaacgaagaaagaaacagaagcttcccaaggagagagctgggttttccaagttacctgaccttaaagatgctgacgctgttcagaaattcttccttgaagaaaca

SEQ ID NO: 956832 - DNA, 597 bp, Homo sapiens
ttatctagggataaaaggttagcttgtattttgcctgaggggtgtgatttactcctgttagtacctatgcctgctctgtcattttgaccagaggttaacatactccaattgcattgtggactgggcccacacctacactaggtgaccaatgtttccaactattggatatgcactgcccttccagcagggctgcggatggcttgccttggcacatacatcttgtgtctgcagagaactggacatggttggagacttgggggtcccatggctgatgcctggaatgcaacatggcagctttggacaaaggatgctgcaagacacatggtgtgcccaacccctggctggcccatagcgtttatgatggggctggctagtggggaacatgtagtactcccagcccaagtgccacagtgcatagagcaacattggggtaacaccactgtgggatgggtacctgtcacagcctttgcaaacataacacatgtcactaccaaggtcaggccctgattgactttgtgccccctgggagtctatgggtctgtggggacacagagtagatttacctacccrcgaactgcactggacattgtacctggg

SEQ ID NO: 956833 - DNA, 679 bp, Homo sapiens
cattctatacttttccattcctgggagctcatagaactcagacacctgatatgtaatgcaatgttttttgttctatttttagcttgagttatgagtcaagaacacactgaatatttttcctgcttggatgagcctccattctccaagttagttagcagggttaaagagaagtttgggggcatctcagcaagaattgctttcaaaaacctcttaagcggctccatctcaacatttatagtaacactttaattttgattttgactttctgatccctcaaaagtattcatctacctctattaatcacattatttatgagagagatataggtctgggtatccgttgacctattcaagaatctagtattgtggatttgccattacagaggcatcccaggagaaaatggtccataggctacaaaggctcttctcaaaagggtgttctaaaactgtcaagggcagcctttatggaatgagtttataaccttctagggtgacaattttgaaagcaacatactaatttggatatctgactcatttggtcaaaaaaagtccacaaatttaatgtacaaaacttcatacacamacacacacacacacacacacacacacacacacacagtccaactttccaaaaaagcaccccccttggttaaaaaaattctaccttagattgggttgag

SEQ ID NO: 956834 - DNA, 553 bp, Homo sapiens
tataaaaaattggttgcttatatttcctgccttttgagacttttaatcttagaagccagttaccatgctgtggagcccaaactgtctttggagaggcccatgtggagatgaacagagacccccagctctcagccggcaccaacttgctaaccatgagtgagctgtgtgaaggagacaagctttctctaccaagccctagtaaatttcacacttttaagctaaaaataaatgatttttaaaaaacattattttaagccagtaagttttggtgagatttgttctgcagcaagacaaccgataatgattttgatacaccagaggcagggtgctgccttaacaaaatcctcaatcatagggctttggacttgagactaggtgatgggctgaagctggagggatctttaggagaatgtaagtgaaaactkaaaaggacttctagaagaatactagaggaagcctatggagctttgaggacttaaaaaaaaaaaaaggaaggaaaaatctcagacaaccctctgttaaacaatagggcttcaataaatcttaagggtgt

SEQ ID NO: 956835 - DNA, 570 bp, Homo sapiens
atccttgatgaacatccatgtaaaaattctcaataaaatactggcaaaccaaatcccacagcacatcaaaaagcttatccaccgtgatcaagttggcttcatccctgggatgcaaggtttgttcaacrtatgcgaatcaatagatgtgtttcattgcataaacagaatgaaagacaaaaaacacatgattatctcaatagatgcacagaaggccttctgtaaaattcagcatcctattatgttaaaaactctcaataaactaggtattgaaggaacatatctcaggatagagagccatatatgacaaacccatagtgatgtaataatgaatgggcaaaagtgggaagtattccccttgaaaactggcacaagacaaggatgccctccctcaccactcctattcaacatagtattgaaagttctggccagggcaattgggaaagagaaagagataaacggtactcaaataggaagagaggaagtcaaattgtttttgtttgcagatgacatgatcctatatctagaaaactccataatctcaaccccaaagctaggaatacctctgcagga

SEQ ID NO: 956836 - DNA, 570 bp, Homo sapiens
atccttgatgaacatccatgtaaaaattctcaataaaatactggcaaaccaaatcccacagcacatcaaaaagcttatccaccgtgatcaagttggcttcatccctgggatgcaaggtttgttcaacgtatgcgaatcaatagatgtgtttcattgcataaacagaatgaaagacaaaaaacacatgattatctcaatagatgcacagaaggccttctgtaaaattcagcatcctattatgttaaaaactctcaataaactaggtattgaaggaacatatctcaggatagagagccatatatgacaaacccatagtgatgtaataatgaatgggcaaaagtgggaagtattccccttgaaaactggcacaagacaaggatgccctccctcaccactcctattcaacatagtattgaaagttctggccagggcaattgggaaagagaaagagataaayggtactcaaataggaagagaggaagtcaaattgtttttgtttgcagatgacatgatcctatatctagaaaactccataatctcaaccccaaagctaggaatacctctgcagga

SEQ ID NO: 956837 - DNA, 551 bp, Homo sapiens
atgattctctgccggagacaaatttgattccccattcyactgcctgtcctttgatggcaaattcatttaggcacattacagtcatacagatgcagactgacccggttagctctacatgccttgtgaatccagttaattgtatatcaactaattgcataattcatttattaatggactgaattaaaatccaagtgttgcagctcctcttcaggattagtgagaagaaaagccttgggagaatttcatttttcagatccttgatcctcccctctccaaaatatattctctctctctttttcatttgggaaaagaactattccacaaaacaattaaggataagataaaaaataaaacatagttacattactaaaactgccgtttttttttctttgagacagtctcactctgtcacccaggctggtgtgcaatggcacaacctcggctcactgcaacctctgcctcccaggttcaagtgattctctggcctcagcttccccagtagctgagattacaggcatgtgccaccatgcctggctaatttttgtattttt

SEQ ID NO: 956838 - DNA, 551 bp, Homo sapiens
atgattctctgccggagacaaatttgattccccattccactgcctgtcctttkatggcaaattcatttaggcacattacagtcatacagatgcagactgacccggttagctctacatgccttgtgaatccagttaattgtatatcaactaattgcataattcatttattaatggactgaattaaaatccaagtgttgcagctcctcttcaggattagtgagaagaaaagccttgggagaatttcatttttcagatccttgatcctcccctctccaaaatatattctctctctctttttcatttgggaaaagaactattccacaaaacaattaaggataagataaaaaataaaacatagttacattactaaaactgccgtttttttttctttgagacagtctcactctgtcacccaggctggtgtgcaatggcacaacctcggctcactgcaacctctgcctcccaggttcaagtgattctctggcctcagcttccccagtagctgagattacaggcatgtgccaccatgcctggctaatttttgtattttt

SEQ ID NO: 956839 - DNA, 668 bp, Homo sapiens
cttatttttttgtggtgagaatattgaaaatctcttttagcaattttgaaatatacaagacattattattattattattttgtgacggagtctcactctgccacccaagctggagtgcagtggcgcgatttcggctcaatgcaacctccgtctcccgggttcaggtgattctgctgccttagcatcccaagtagctgggactacaggcgctcgccaccaccctcagctaattttattctttatttttagtagtagagacagggtttcactatgttggccaggttggcctcaaactcctgacctcgtgatccgcctgccttggcctcccaaagtgccgggattacaggcataagccactgcgcccagtcgacattattattaatatagttactatgttctgcaatatatcactaagactcatttgtcccatctaatggaaacttttcactctttgacctacatctcccctttctccaaccccctctgtccctcagtccctggtaagtaccattctactctccgcttttatgagtttggcttgtttaaattccacatatacgtgagatcgtgtggtatttgtctttctgtgcctgacttacttcacttagcaygatgtcctccagactcctctatgctgttccaaatggcaggatctccttctgtttgca

SEQ ID NO: 956840 - DNA, 517 bp, Homo sapiens
tgcagtggtagtccctgcattcgaaacatagagtcttttactgtgtgcctagtctaggaaggcggacatgttgccacatctaggatgatgatggatccatgcaccaatggtgtccatgtttcaccaaggctccatcagcaacttgattttgcctggtctcatgagggaacaggcgtttgttgtgtcatctctgtgagtggcctaggtggtttgtgggtgcctacacccatcagattcccttcattctgagccccttccctccttatggctccttagcatactttcctgggtgcatatgtcctgcaatacctcttgagggagcaccaagaaataccagcccctctcataatcatctttctctttaaagcagttgaggtcagagtagagggggtaggaaggatcaaggggtgtgaaggtcgagagcagtttcatgccaataagcaaggcacaaccaaacacrtttctaatgttatggactgcacaattgtgtccttccaaaattcacctgttgaaaccc

SEQ ID NO: 956841 - DNA, 562 bp, Homo sapiens
ttctctagacaagctgacctttgctacttagtagggtgtacgttgcctctaagcccatttccaatttactgacacctggtggatttttattcaccactgagctctggcccgaagagagctgccaaacgtcctaggccatccattcactcagcacttataatcgtgatagtcaccacccatgaaagctttaggacctgtttcaggtaagagcactaacttttgggacagagcctaccagtgttcaaattttgctttgatggctactaaatagctacagtttggaagctcttgagcttcctctggtcccccttcctagcctgtagaagaggatattgctaaagggctattgtaggtaaaatgaaatgggatcagggttgcaaatgccgttttttactgttgcagtgtttctgcatcgtgtcgcctgagggctttcttctgtgaccagaaactgctctgcccccamgcagcactggcctggaactggagaattaaagacctccctaatcccacacgcaaactttgatgtgattggcatataagtatcttagcaccctagtatcat

SEQ ID NO: 956842 - DNA, 638 bp, Homo sapiens
tctcctttccagtcacctaaaagaaaactgaagagtccaaaggtgttggtgaccttgtgaagaacccccyaaaagtctaattgcacttaaaaagcaaagaccaccctgcagaaatgattgcagatgtttctaactctatctgcaggcctaagaaaacaccgagatcagaggggacctttttggatggatcaaatttctgaatagttcatgatatacagacttaacttctagaaggctaaactttgtaattattaacaaggttgttcacataatgtaggtaagctcctctgtcctgtgaaacaatccatttacatgcttcctgaatcatcctgggaatttaagatctttacaacagtaagctaactaaggccctggacatcaaccttctggtttgacaaccatttatttgcaagctgtgttgacatcactcctatgtgacaaatttacaaaggaagagacacagcctagcacatgaaatataagatgattctatgtcttaagtacttaaagcctattaccaaaataggtgtgcaatgttgctgttataaatatcatccttaacaccttttgattcttttactctgaagtgtccaacctattatggaacaaagaaaggccgccttttaaatcttgctcac

SEQ ID NO: 956843 - DNA, 571 bp, Homo sapiens
ggagtctcactctgccacccaagctggagtgcagtggcgcgatttcggctcaatgcaacctccgtctcccgggttcaggtgattctgctgccttagcatcccaagtagctgggactacaggcgctcgccaccaccctcagctaattttattctttatttttagtagtagagacagggtttcactatgttggccaggttggcctcaaactcctgacctcgtgatccgcctgccttggcctcccaaagtgccgggattacaggcataagccactgcgcccagtcgacattattattaatatagttactatgttctgcaatatatcactaagactcatttgtcccatctaatggaaacttttcactctttgacctacatctcccctttctccaaccccctctgtccctcagtccctggtaagtaccattctactctccgcttttatgagtttggcttgtttaaattccacatatacgtgagatcgtgtggtatttgtctttctgtgcctgacttacttcacttagcaygatgtcctccagactcctctatgctgttccaaatggcaggatctcc

SEQ ID NO: 956844 - DNA, 588 bp, Homo sapiens
ggctgtggtttcctctgtcctgggaccccggaggacagggaggagagaaaagccagcaccaaactgggaggggaagtgttggacccagcgctcagacagtgtctgtgcttttgcagacacgagggccgctgcctgtgccctgccgcggttcctggcgcccgctcctgccaaggtgcctgcgggccgagcctcctgaccagaaaacccgaccaggtggctcgcgccgggccctctgtgctgccagcgcggctcctcagcgtggccacatcctcggggagggctggcgcattggctgcccggggctgcgggttggggcgctttggcccacagagagccccgggcgcgcacctcccgcaaatgcgcctgtccgctcttcctcccgcccctcctgcctctccactgatgtgaggaagagtccgtttctgcagtgatttgcccgggagctgaacttattcactggcggacggcttgggcatggaggagggcttggatggagactggggaktgttctctgacccacgtagtctcccttgcttcgtgcagattctgctattataattagctttctgcggggcaaggcgtcacgcc

SEQ ID NO: 956845 - DNA, 600 bp, Homo sapiens
tattttactagagcgattgagataaagtgaattttaattttttrttttgcccacaggtatcttggaacataatacaccaagaagtcaatactgagccatataatccttttgaggaacgacaagtgagtcaaaattacattaaactgtttaaaggtttagttttcattaatttatctagatggaatgatgaactagaactattttggagtcagcttattccacacaaagttatcatggaataagcttgagaacataacaaaaaaatgattttgtttttattgttgaaatttgagaagggaaggaaaaggtaatttttttccagcatacttatttcaaattataacagcgttattgttttattttattatttttaaaattttatttatttttattttaattatttttgagacacggtctcactgtcatccaggctggccagctttattgttttaactggtataatgagcatataataatttataagtaagcttattcatgcgaataatacagaaagataaagaccttctctactataataatgattcaattagaaaacctactaatataatttagttcgttaatatgcatcataagagaaaa

SEQ ID NO: 956846 - DNA, 624 bp, Homo sapiens
catatcctggggaggagagcccactagggagcaggtgccaaattcccccacggtggtggaggcaggggagtggcagagactatctgtgactttggcggtgtgctctgggcaagtgactgagcctcagttttctcctctgtacaatggggagaggacgtacagggggcccataccagaccgtgagccgcagtgaaaggccaaggaatgtagctgcccctgactgttacaatcatcaagtcctggtgtctctatgtgctttccaaaccagaagccacaaaaagactactcaactacagaaaaacacaaagcctccatgtggcaaaagcccataaacaaaaataaaagatgcatggaaaaacatttgcaaatcatcacagacaaggaaccaacctccttcacatatacaaggaacctataaactgataagaaaaacaggcaaaggaaaaaaacagtgtttgcaggaaaggctgtgtaaatgatcttcagcttttgaaaacacgctcaaactcactctrtaacagaaaagcaaacttaacaattgccccaagacaggcttcttacctgacaggaagaatcctgcagcctggtgagactgtggggaaatggaccttcttgggaatgtag

SEQ ID NO: 956847 - DNA, 663 bp, Homo sapiens
aggcttgaggctacttcttataaacwgtggccctgggcacattccttagctcacctgagcctcagtttcttgatgagaaaaaatcgggacaatagcaaccaacctatctcagagggctgctgtgagaccctgagccactgtttctcaaactgcccctgagatcacctacaacagaatggctgtagggtgaagtttgagaaccgcagtataggtgaggtggtgcgtggggcaggccctcccacactgtaaagtgcagtgtggtgcggtaaaagctgatattcccgcaggcatcctcagagtgggcccaattagactcttgagcactgattccattcaaggtctgcggcttagagaggatggcaaagtgaggcaccaccaggagcttgtccctatgggctccaggccaaggacgtgcctggagatgactcctgccttgtggcgctgtcactgcctcactgtccacattccatcacgcctcagatcctggcttccaccctggtgaaaggaatctttcaatatcacccacccagccacagacgcttctctgcttctctggcaaggctgcaccccctggctaggtgggcagggccaggggctccttgagacagtctgcagccactgagctctccagcctccagggcagaggtacagtcccatggagcg

SEQ ID NO: 956848 - DNA, 667 bp, Homo sapiens
taggtgaggtggtgcgtggggcaggccctcccacactgtaaagtgcagtgtggtgcggtaaaagctgatattcccgcaggcatcctcagagtgggcccaattagactcttgagcactgattccattcaaggtctgcggcttagagaggatggcaaagtgaggcaccaccaggagcttgtccctatgggctccaggccaaggacgtgcctggagatgactcctgccttgtggcgctgtcactgcctcactgtccacattccatcacgcctcagatcctggcttccaccctggtgaaaggaatctttcaatatcacccacccagccacagacgcttctctgcttctctggcaaggctgcaccccctggctaggtgggcagggccaggggctccttgagacagtctgcagccactgagctctccagcctccagggcagaggtacagtcccatggagcgtggctgatctgaaggcagttctggcctaaaaggggtcttgtcccttcctcgtcctcattgctcccaaggccaggttggcagcagtagcagcggggttggatgctattggatgggagaaggtgaatggactyggagtgcagaatcaagctgcggaagccaagggccttgaaggagggtcacacacaagggacaactgcagaggaaaataaagg

SEQ ID NO: 956849 - DNA, 670 bp, Homo sapiens
tggtttcattgctcaatcaaattaacacatctcctggtagctggtatgcagccattgacttggcaaatgcctttttctccattccggtccattaggcccaccagaagcaatttgccttcaactggcaaagccagcaatatacctttactgtcctacctcagagatttatcaactctccagctttgtgtcataatcttgttttttttttcttttgagacagagtctcgctctgtcaccaggctggagtgcagtggtgcaatctcagctcactgcaacctctgcctcctggattcaagcaattctcctgcctcaacctcctcagtagctggggctacacgcgcgcaccaccacgcccagctaatttttgtaattttagtagagacggggtttcaccatgttggccaggatggtcccaatctcttgacctcgtgatctgaacgcttctgcctcccaaagtgctgggattacagacctgagccaccatgcccagccctttgtgtcataatcttattcaaagagatcttgatcacttttcacttctgcaagatagcacactsgtccattacattgatgacattattggattggattcagtgagcaagaattcacaaacacaatggacttatcggtgagacatttgcatgccagagaatttgaaataaatctgact

SEQ ID NO: 956850 - DNA, 695 bp, Homo sapiens
ttgcaagagaattttgcaggtaaaatacatactgatctttytaataaactgaaaacacctagtaaaaaaatacacgtggtaatagcacaatgcaatttgtataacagctagaacaaattcttgaccaaaaaatatgatgcaactgtgcagaaaatgacgttttacttagggagataatggctaatttcataaaatagtgaaatatgtcacactgttcactggtaaaggtaagtctagcaaatctattagttttcctgtatcacaaaatcgaatcaaatctctttaaaacgtatgaaaccattgtaaatataacttgtgttgcattgctgtctttttttttttttttttttttttttagacagaatctcgctttgtcgcccaggctggggtgcagtggcccaatatcagctcactgcaagctccacctcccgggttcccgggttcacgccattctcctgcatcagcctcccgagtagctgggactacaggcgcctgccaccacgcccagctaatatgttgtatttttagtagagacggggtttcaccgcgttagccaggatggtcttgatctactgacctcgtgatccgcccgccttggcttcccaaaggaattgctgcctttaacatgtcattgatcctttatttttcctggaaatttttcattattcaccatctttttgaacaaccccagctgc

SEQ ID NO: 956851 - DNA, 669 bp, Homo sapiens
gaactgcccctgagaccaccagtgcaggctgggggatagtgcaggctggtggcaggagtggaggtcatggacatttgagccacttccccatgtaayttacttgtgccttcagcccaaatacgtatataccacttccactgaatgatggaatgctgctgtgcatgatccactttatggctaaatgggttagaaagcacccacttcatgacaggcagttcaggttgcgtggggactttaagacgcatagtcaaatgttcagtttccaccaaagcccagtaataggccaagagctgtctctcaaaaagagagtagctacctgcagaagatggcagggccttgcaccaaaatcctagaggcctccactgtgattcacttacagtggcctgacaaagactccaagtagctttgctatctgccgctgacacccaaataccattgggtctgttgggtcatacggcccaagtggcagagcagcttgcacagcagcctggacctgttgcagagccttctcctgttctgaatcccactcaaacctggcagccttttgggttacttgataaatggactggagtaacacacccaaattagagatatgttgcctccaaaatccaaataggcccactagccattgtgcctttcttggttgtaggaggggctaaatgcagcaac

SEQ ID NO: 956852 - DNA, 640 bp, Homo sapiens
ccatagatgtctgcaacttcaaaaacatccacagtgacaaatgtgtaaaaaaaattctgtgaactcttctgtggtggtgtgtgtattgaggtggataagggaccccctattaagggcctgacttctccccctgaagcacggaaataaaggagaatcttgagtttcttcaagggaaatttcaggtacctcactgtccctgagaagaaaacctgactagcaaaaaggttaaaggagcttaaaacaaccaaggaagttagaggcatgggatgtctgggtccctatagaaactaaaaacaacaacttaacatatgcccctgagttgtttttcaaacactcagaccacctccaaaagtctcggctgtcagtaggcctcagataatgggaaactgaggactgaggtctgactgcccttctttgttctaagtctcttactgaggggccctgaggaaatcacgcccatgagccagagctaacatttctttctgttgaccccaattttttggacaaagctttacgaccttaaccagttgcaaatcaggaaatttctaaatctacttacctttgayctgaaagcccctgcttcaaaatactctactgttttaggccaaatcagtgtataacctctatatattgatttaca

SEQ ID NO: 956853 - DNA, 728 bp, Homo sapiens
gcaataaacatacgtgtgcatgtgtctttatagcagcatgatttatagtcctttgggtatatacccagtaatgggatggctgggtcaaatggtatttctagttctagatccctgaggaattgccacactgacttccacaatggttgaactagtttacagtctcagtaaactattgcaagaacaaaaaaccaaatgccgcatattctcactcataggtgggaactgaacaatgagaacacatggacacaggaaggggaacatcacactctggggactgttgtggggtgggggtaggggatagggatagcattgggagatatacctaatgctagatgacgagttagtgggtgcagcgcaccagcatggcacatgtatacatatgtaactaacctgaacattgtgcacatgtaccttaaaacttaaagtataataataataaattaaaaaaaaaaaagttctgactcatgcgatggcattgatgaaccttaaagacatcacgccagcagaaataagctggcttcaaaaggacaaatattgtttgcttgcccttatatgaggtatctagagtagtcaaatccatacagacaagaagtagaatgawgttttccaggtgttaagttttggtttgggaagatgaaaaatttctggagataaatggtggtactgtggttgtacaacagtgttaatttacttaatgacactgaagtatacacttgaaaatggttaaa

SEQ ID NO: 956854 - DNA, 668 bp, Homo sapiens
ctccttttgtcgccaatacaracctgttgacaggtcacgcctgggaagcgggtggggtgtcccggagcggtgctgaggcgctgcaggcccggcttctggctgcgggggagctgtaccctgaagcctcgccggaactcgcgtctggggccagcagggggcactagagtcaacagggactgtatgcaaaacccacttcctcccaggccctctagggggatggtcaggcttctgcagagatggggaggatcctttcctggtaaggggagagggacgggctaggagccaagcggaaggaccccgtgttcaaggcccttcaagggacgggacaggcgaggaatctctttgagtcttttgaattgttttatcagtcaggcctgggaagtactccgcctccacaaactctgttttcctgaaaggggtcgggggggggaccccaacatctcctgccacaggctatgatgggcatggtggctaagagcaacaggccgcgtggtgaggctggctttttgtggctctgccctgccattccccgaggcatccccatgccagtgaacagagctgcgggttcccagctgcacagatgaatgcacgaacaaaacataggtccatacaaaggaagtcattgcattgatccagattcgacctgggattgtcgcataaaacagggc

SEQ ID NO: 956855 - DNA, 626 bp, Homo sapiens; identical to SEQ ID NO: 944503

SEQ ID NO: 956856 - DNA, 732 bp, Homo sapiens
ggccctggatgggcatccccagcctccttcaggagacactcttcagagggacagggcttctcacctgcctcaggccacagctctgaccatggtgctgtccacgctcagtgacaggacactgagcaggggcctggctggagtaaccagggaccacccaatctctggagctcacatgctgtgcagagaccatgaccctgggacccttacagagaccatggacctaacgttagattctcagtccagtgtggttttctgctgctttttgcaagtttacataaaatattgatgagaaaaacatgaataaataacagacaagttgacggtgctgattgctaatctcttgtggcaatgaggggtgatgtagcaggagcagcaccacgactgaaatgagaccagatgccatgttgactccacaggggtgtgtggttgcttaaatgacccaaatattcccactgaataatcagcaagtgtcctaatgacacagcacagcatttagatgaaatgaacaagaggggactgagtctgagggaccaggaggaggaagatcatgggtccctgggccacctgctgctgagtcaggtgtcatcatgatctctccrcagagcccagctcagccccatggccaacctcctggaaggtccacagctctgctgagcctggcccaggacagaccccaggtcagcgaggtttgggacagtggtcatgaggttaattcccacaaaggtctatgat

SEQ ID NO: 956857 - DNA, 714 bp, Homo sapiens
gcctctgtgggaaagtggggcagagactgcaatgatggtgctgggggatatgtgaggaagaaattcacttgtcaaaagggaggagaacctaaaaacaggacacagatgccctcgtgaacagacccagaggagggacctggcaggggatgttcagacagagacgtcccccaaggaaagacgagggcccagggctgaacccagccagcgtcggggagcataggtgaggtgagagctggctgataaggaggggagaatctggagaggaggctggagcagaagaggcctgattctcctcagtcctcagatgctgaggagtttcccatcaggaggtaagcgtccccgccaccgccaagttgacctcagtacagcaagggcccagcctgaggtccctatcctgggccttagtccttcacccacctgaaaactgaggccaggggctccccaggtggacaccaggactctgaccccctgcccctcatccaccccgcaggtcagcccaaggctgccccctcggtcactctgttcccgccctcctctgaggagcttcaagccaacaaggccacactggtgtgcctgatcagtgacttctacccgggagctgtgaaagtggcctggaaggcagatggcagccccgtcaacrcgggagtggagaccaccacaccctccaaacagagcaacaacaagtacgcggccagcagctagctacctgagcct

SEQ ID NO: 956858 - DNA, 508 bp, Homo sapiens
gatgctcccaaggttaccctaacagatgtgactggcacttcatattgggaccagccaggcctcactgaccaggcctatccaactagaactactccagaaggtggggctgaaacccaccaaggttcccagaacactgcactctagggcaatcagcctctgcatgggaggagaggagcaccctctgcaccaccccatggtgttaccaaaagttgaaccatgggttggttcaactttgcagagaagagaccacctatcccatctgtggaaattcactccttagcgacactaatgccctctaataaattcaatcctgggcctgagtgatggttggtgcaaaaaacaaattcaagatcccagtgtcctccagaagcctggatttccagggatcctgctgtgggtcacaggatgtcaccggtcccctctctctgtgggttaagtgtgggggccatgtggactccctcatgagcagatgccaccaggaccactggscccagcttcctccttcaca

SEQ ID NO: 956859 - DNA, 613 bp, Homo sapiens
ggagtgtgcttcatgctctaggaaggagccactttgcacacagawgatccggggcccagccatccttccagggtgaataattaatgtcttctctcatggtgaactctaggattcaagccatctaatgtttttgaagccactgtcattatatttaattgatgatgacaggtggccaccaatgatgaatattttcccagggggagtctccctaagtggctttagacttcctcacatggccccaggggattaaatggctcctgattactcagaggataagaggttctgtcttatcatgttcctttcttatttgtcttatgtgtctttcctgccccaggcctgggatcccccactgatctcccttcccttagtgagaggtggtatttggagaccacattctggaggctcccttatgtcccccatttgaaaaagacaacggcagccaccaccccagctgtcccacccaacatgaggccagattcggggtgcagggatgctcccaaggttaccctaacagatgtgactggcacttcatattgggaccagccaggcctcactgaccaggcctatccaactagaactactccagaaggtggggctgaaacccaccaaggtt

SEQ ID NO: 956860 - DNA, 613 bp, Homo sapiens
ggagtgtgcttcatgctctaggaaggagccactttgcacacagatgatccggggcccagccatccttccagggtgaataattaatgtcttctctcatggtgaactctaggattcaagccatctaatgtttttgaagccactgtcattatatttaattgatgatgacaggtggccaccaatgatgaatattttcccagggggagtctccctaagtggctttagacttcctcacatggccccaggggattaaatggctcctgattactcagaggataagaggttctgtcttatcatgttcctttcttatttgtcttatgtgtctttcctgccccaggcctgggatcccccactgatctcccttcccttagtgagaggtggtatttggagaccacattctggaggctcccttatgtcccccatttgaaaaagacaacggcagccaccaccccagctgtcccacccaacatgaggccagattcggggtgcagggatgctcccaaggttaccctaacagatgtgactggcayttcatattgggaccagccaggcctcactgaccaggcctatccaactagaactactccagaaggtggggctgaaacccaccaaggtt

SEQ ID NO: 956861 - DNA, 779 bp, Homo sapiens
tgtatatcacacagcagagtgaacatagttaacataatttattgtacatttcaaaatacatagaagatttgaaatattcccaacatatagaaatgacaaatgctcaaggtgatggatatcctaaacactaattcgatccttacatactgtattcatgcatcaaaatagcacgtataccccataaacatatacaattataatgtatcagtaaaacatgttctttaaattaaaaaaaactgtcaattctgaattctttactcagtgaaaatatctttcagaagggaaggcaaaataaaatggttttaaccataaatatacttgcactattcatgacctgcagacacacactatagaaaataataaagaacacttctcagatagaaaatcatactaaagatgtgactctgaataaagaaaacaaaaacatcaaatatagtaactacataaaaacatatagaaatggtaaataaacatagatataaacgacttaaattacattacaaaacaactagacttaatagacaactatagaacagtccatccaacacagcagaatacataataatctcaagtgcatatggaacactctccagggtagaacctgcaaaaaaaaaatgagtaccttaaaaaaatagaaaatctataaagtatattctttgtgttacttcactcttgtattgctataaagaagtacctgagcttgggtaatccataaagaaaaraggtttaattggctcatggttatgcaggctctacaggaaatctggtgccagtatctg

SEQ ID NO: 956862 - DNA, 501 bp, Homo sapiens
ccttatacaaacatacagttttaaaagctagaaacaagctatctgtcaaaatgctttgggatgtgctattttatgtcacggaatgaaacctgtgttttaattcaataggttcaacacattcttttggtagaatctgagaagtgacattcccaaacctctgaggcctttaaaagaaaatacgaatattttcctctaaaaactagaaacaagcaatgcgtggaaacgctttctgatctgttagtgtcacagattggaaactttgttttgattgagcaagttcaacgcactctttgtaggatctaagtagtgacatttccaaacctattgagcccttataagaaaatatgaatatttagtcctaacatgctatctgtgaaaatgctttttttttttttttttgrcacagagtcttgctgtgttgccaagctggagtgcagtggtgtgatctcggctcactgcaacttctgcctcctgggttcaagcaagtctcctacgttagcc

SEQ ID NO: 956863 - DNA, 550 bp, Homo sapiens
tgagccagcggcccgagaaatgtgcactgagtttttatgatattgcactttttcttggagttcccacctctgttttaagtctccacctttttttctttctctagtttttctgcttcagccttaagtccctgccttttccccacatagtttccagcccaggctgtgggaccctcccttaacacacacatgggcccagtgtttgataggaattctacctaatggctgcattgctcattactgccaccccaggaaggttgtatggtggtcaaatctatacttactgtacctgcatctctcttagaaatttctcctttgctctcacccctattatcagcatgcagctagctacattctgacaggttaacttcagagtgagtgaatactgggtgtcttaaggggctttgttctggcataggtatttaccctaatctctgttcgtatctagcatgtgtgctttgggtggtctctggggtrtgagattttccagaactcccttttctcaggggctgcccctcctgcttctgtctagctatctgcctactctaaagtt

SEQ ID NO: 956864 - DNA, 613 bp, Homo sapiens
ctcaccacagatgtagtcagaaacttgctttgccttctgaagccaggcaaagyttcctggggacgctggcaatggggacaattttcatccaaggccttttagccacaatggatatggagtgaaatcagtacagaggagggaaggagtgtgaggtgtcggggtcgctcgctttggaggccagaactggcattcacctctcttctcatccgcctactctctccagggtcctgtcggtcctgctggtggtcctggcttccctggtgctcctggagccaaggtacgtgccctgttgtccagtcaggaacttctgggtgccgagaagctgtcctttccccgtaacccttgctcattgctccctcaacaaccacctgctcccttctgagaagtagctccccaccaccccacccactggcccctccatccaggcagggcaaaaagccagacactcgcagtctcacctggagggaagtaagacagaagataaaatgtgggagatccagttacaactttggagtggggaaaggtggacagagaagaagacggggatacaccataggcctggcaggggcagaaggccaggagtggcagcacagggaagcaaacctaggggaga

SEQ ID NO: 956865 - DNA, 668 bp, Homo sapiens
aggctgaggcaggataatggcgtaaacccaggaggtggagcttrcagtgagccgagatcgtgccactgcactccagcctgggcaacagagcgagactccgtctcaaaaaaaaaaaaaaattaaaaataaaagaaagaaaaaggaatattttgatacatgctatcaaatggatactctcaaaggattttcaagaaacattatgttaactgcaataagccggaaacaaaaggctgcatattatatgattccacttatatgatgtacttaccggcttcagatccagagtcaaaaagtagaaggttggtttccagggcctgggaggatgggggaatgagaaattgtataatggggacagagctttagtttgggaagatgaaaagagttctgaagatggatggtggtgatgactgtacaacagtgtgaacgtacttaatgccactgaactgtacagttaaaagtggttaaggccgggcgtggtggctcacacctgtaatcccagcactttgggaggccgaggtgagcggatcacctgaggccaggagtttgagaccagcctggacaacatggtgaaacccccatctctacaaaaaaaaaaaaaaaaattagctgggcatgttggtgggtgcctgtaatcccagctactcaggaggctgaggcgggagaatcac

SEQ ID NO: 956866 - DNA, 615 bp, Homo sapiens
caggctggtactggggtttgtctgcacagagtcttgtgacgtgaaccatctgtgggtctctcagccatagatacaaccacctgctccaatggaggtggtagaggatgaaatgaactctgtgagggtccttacttttggttgttcaatgcactatctttttgtgctggttggcctcctgccaggaggtggcactttctagaaagcatcagcagaggcagtcaggtggtggtggctgggggggctggggcactagaactcccaagaatatatgccctttgtcttcagctactagggtgagtaaggaaggaccatcaggtgggggcaggactagtcgtgtctgagctcagagtctccttgggcaggtctttctgtggctactgtgggaggatgggggtgtagtttccaggtcaatggatttatgttcctaggacaattatggctgcctctgctgtgtcatgcaggtcatcaggaaagtgggggaaagcaagcagtcacgtgacttgcccagctcccatgcaactcaaaaggttggtctcacttccagcgtgcaccctcccccgcaacagcwccgaatctgtttccatgcagtcagtgagcaaggctgagaacttgccc

SEQ ID NO: 956867 - DNA, 578 bp, Homo sapiens
cactatgggttcatctttattgtctcctttcatctcaacagctcctgggaaatgtgctggtgaccgttttggcaatccatttcggcaaagaattcacccctgaggtgcaggcttcctggcagaagatggtgactgcagtggccagtgccctgtcctccagataccactgagcctcttgcccatgattcagagctttcaaggataggctttattctgcaagcaatacaaataataaatctattctgctgagagatcacacatgattttcttcagctcttttttttacatctttttaaatatatgagccacaaagggtttatattgagggaagtgtgtatgtgtatttctgcatgcctgtttgtgtttgtggtgtgtgcatgctcctcatttatttttatatgagatgtgcattttgatgagcaaataaaagcagtaaagacacttgtacacgggagttctgcaagtgggagtaaatggtgtwggagaaatccggtgggaagaaagacctctataggacaggacttctcagaaacagatgttttggaagagatgggaaaaggttcagtgaagacctgggg

SEQ ID NO: 956868 - DNA, 614 bp, Homo sapiens
gcagtgattattgcaatgattaatgtattgataagataatatgaaaacacagaattcaaasagcagtgaactgagattagaattgtggagagcactggcatttaagaatgtcacacttagaatgtgtctctaggcattgttctgtgcatatatcatctcaatattcattatctgaaaattatgaattaggtacaaagctcaaataatttattttttcaggttagcaagaactttttttttttttttttctgagatggagcattgctatggttgcccaggctggagtgcaatggcatgatccaggctcactgcaacatctgcctcccaggttcaagcgattctcctgcctcagcctcccaagtagctggcattacaggcatgtgccaccaccatgcctggctaattttctatttttagtagatagggggtttcaccatgttggtcaggctgatctcgaactcctaacatcaggtgatccaccctcctcggcctctgaatgtactgggatcacaggcgtgagccaccacacccagccaagaatgtgaattttgtagaaggatataacccatatttctctgaccctagagtccttagtatacctcccataccatgtg

SEQ ID NO: 956869 - DNA, 562 bp, Homo sapiens
ttcaggatcatcatctataaagtaagagtaataattgtgtctatctcatagggttattatgaggatcaaaggagatgcacactctctggaccagtggcctaacagttcaggacagagctatgggcttcctatgtatgggtcagtggtctcaatgtagcaggcaagttccagaagatagcatcaaccactgttagagatatactgccagtctcagagcctgatgttaatttagcaatgggctgggaccctcctccagtagaaccttctaaccagctgctgcagtcaaagtcgaatgcagctggttagactttttttaatgaaagcttagctttcattaaagattaagctcctaagcagggcacagatgaaattgtctaacagcaactttgccatctaaaaaaatctgacttcactggaaacatggaagcccaaggttctgaacatgagaaatttttrggaatctgcacaggagttgagagggaaacaagatggtgaagggactagaaaccacatgagagacacgaggaaatagtgtagatttaggctggaggtaaatgaaaga

SEQ ID NO: 956870 - DNA, 725 bp, Homo sapiens
ggatgctgcagggaggggtgtccaagcaggaggcagccaagcctgcctggagcaggataagatgagctcccctctgagactcagtattttctgttcaatgaaaggaacagtccagtatttgagamaggagaaccggaattgacttgactggtctgtggtgctttttttttttttttcctgtgccttgattcttccatttaaatacagaggacacctgaccctaaggcgcatggaccagagacatcatctgaacccagagtagcgtgcatggtgattattttgagatttcctctctgtccccatctgggctcattttcactggatggaccccaccatgcttcttagaccctgcggcaggctggccagcccaggtggagggcatgcgctttgccaaaggcgagaccgctggctggagactggactgcggggccatcctccaggctcttgcacggggacctggaggatgtggcccaagctcagtctccttcagtctgcattggtggctaatcaggacacgggtatgggggaaatccctgtaggtctggaggtggctgggatggcccagggcttgtttctcaccctttacctctagtttatatcccactgacaccgaggtttattcgcaatgcacttcagcagatagggtgatggggtagaatcacagagctgaggagtccacggtaaagaattccaggtccctgtgcttctcctgcatcccagctctt

SEQ ID NO: 956871 - DNA, 638 bp, Homo sapiens
tgtctgggcttgggtccctttgcttcatagccttcttgctcccttttaccaaagcgtgtgctgaggatggctccatccatgtgaccagagcctttcctgtgaattttcacttgaccctcattaataattcttggcctttctgtcacttccactttacaaaggtgaaactgaagtccagtggtggcttccccaaggtctcatggctagtgagtagcggcacattcagtagatgctctgccatgccctccaagaaagcagtggacccacgccccccctcacatgagaacgtagcccgggctggttgcaggctggatggtgctggaccgcccggccctgcatgaagttctgattcctcttgctggtcccacagctcagggggctgcttcagcaatgctctggggcccagatgctcaccccttgccattggtgcatgtccccccacttgacctcttgggttccttacttcttgggctgagaaaatcactgccccagggcagttgctcctttttgtctttttggtccctgatgacagattacttccrcactctgcttagcttatttctagatggtttccaccatagcctggcatggtggctcacacctataatcccagcgactcaggaggctgaggtgggaga

SEQ ID NO: 956872 - DNA, 604 bp, Homo sapiens
aactggtgtgctgcagaccaggagttagcacagatcccacggggcccacaggactggcctccctccagacaccagccacaagctctagagggtctagatgccacttgtgcttctgaccggctgcaaatttagggctcccatgacccccttaggttcaataacttgctagaatgactcacagaactcaggaaagcactacacttaaaattgcagtttgttttttgttgtcgttttgttttggagacagggtctcgctctgttgcccaggctggagtgcagtagcacgattgtggctcactgcaaccttgacttcctgggctcaagtgatcctcccaccttggcctcctgagtagctgggattacaggcacgtgctaccacacctggctcatttatatttttagtagagacaaggttttgacttgttgcccgggctggtttcgaactcctgggctcaagtgatccacctgccttggccttccaaagtactgggattataggtctgagccacagcaccyggccaaaattagttttattataagagatgcaactcaggaccagccaaatgaagagacagtgaagaagtaatgctgatggatcacacct

SEQ ID NO: 956873 - DNA, 606 bp, Homo sapiens
tgtaaccgagctccaacctgtcccgggaatgcccacgccaagaagcaccgtcacggcgaagacaatgttagttcctcacattcattcccatggggactgcctaccaatcacagaaactgtggggctaggaggcccttgaagaccctcttcctggtgaggaagagcccccagcacacagttctggctcagcggctccaataaagcctctgcagcaacggcgtggacggctgccacagagccgatgaacaaacacgcccttgaaagaacgctgggaacaactggtggaggccgggctgagagcctgcacttcagaaaaccaagagagagcttccccaagggtttcaatcagggcgatgatgtggtgaagagggtgcttaaggaagatggttcgagcagttccaaaagaatgaaatggagacagtaagaccaagagtaggaaaaggagctaagaggcagaagcggccaggtcgtccgggagctgacacgccggtctgcgtgttgccgtggttttaagtgagtacatagcctcatacttctctgaacttaaaacagcggcagtgcttgtaaacactagtcgctagaggarctctgctcggacggccttat

SEQ ID NO: 956874 - DNA, 604 bp, Homo sapiens
gcgtgccgctgcacctcctgggctgcctcctcagggccaagggcaccatggctgaggtaaggctcccgcccggcccgccctcccctcccctgctgtgaacattcaacccagcctgcttcctagccagggagtggccccgactagggtggcaggcagtgggaaccggagagaggcagaggaagtcaccgtggggacgagcaggtgaccctgggggcttcagcatgtcctcctctcctgcagcgctggcagcacctgacccagcccatctggggcctccaccacttggagtaccgagctcaggacgcagatgtcaggggcctgaccaccctgaccccagtgtccgagagcagcaaggtcgtcgtggtggagagtgtcatgtgacaactcagctcacatcaccagctcacctctggtagccatagcagcccctgcttcagccccaccgcacccctccagggggcctgcctttccctgacacttttggggtctgcctgggrgaggaggggagaaagcaccatgagtgctcactaaaacaactttttccatttttaataaaacgccaaaaatatcacaacccaccaaaaatagatgcctctccccctcc

SEQ ID NO: 956875 - DNA, 546 bp, Homo sapiens
gtgaaggtcaccctggaacctttcttctcgattgtgctgcggggcccctgagtgatctgagttgcatctgagggtaatgcgtgcgtggggaagtcactctgttgtcctccagaggcccagaccctccctcccagaggcactgccagccatgtggcaagggttgcctgacctttaaccttcaggttagccatgatggtaacattgttttggtcattggcagccaggcagaagtagcgtccggtgtcattggcctggaggtctcgaatgcccagggtcccattggcataggggaagaagcgttcgtcctgaagcactgttgtcccatcctcgtccagcctggagggagcagggcgggcctggctctgactggctggcctgggctccctgccctccctggctccctggccactgggacamgacactcaccactaccaggacgagacactcaccactgaacactgggcacaggcgctccgaaggccttgcacagaaggtaggcagtgctgccctggacagccatgtacgtctgattgtccgcagtcagga

SEQ ID NO: 956876 - DNA, 509 bp, Homo sapiens
ctctcccttcctgggggactttgaggacataggcaagtcctgtaggcctcagtgacccacattaagcagagcsgacatcatctgccgtaacaacctgcccacaaagccagggctagaggcaaagccttccttgtgagagagtctaaataccagaaggggtgaggcatcgttgccatgagtatgaagggcctgaggtgtctccttttccgtgtctctcccccgatccttctctctcctaggagagccagtttctgagtgccccagaggagaatgctgtagtgaacacagccctgtacagagaagacagcagcttgattcctctcatttctcagtcattagcccctcactcgctctccgggaggataacggggtgtgcgcagctcctccccttctttcctgaagaaacctcagtggcttccgtgcccttgccagggtgagtgttctcctgagtccttcctctgctcctgcaagatagagaaggggcttctgttgccatcagcttagtaagc

SEQ ID NO: 956877 - DNA, 614 bp, Homo sapiens
gatgcccaggatgtggtagggtgcttaaaaaatactgagagaagacccagcctccctccctagcycacggggtagcacctgacccgtgggcagctatgccggaggttgcccagtgacctaagtctagccccccaaaatgagctggttacagtccctgtatgggttttcgaaattagcaaattactccaagctccccctagttattttcttacctgatgggggcacaccttgtagattttaccacctgtgaagtgacgtgggggccgtatagctctagctccattctgtacagattcgtagagggccaacaaggagaagcagagctggtcctggagtagaaggacaagattaaaaacataagggcgaatgctaagggaccacggctggtgctcagcatcacacactcacccaacacccaaagcaaaagaataaactgcctgggtcagagcgggccttggagcctcatcagcccaacctcctctaggtacaggtaagcaatcggaggccctgaaaggattaggtcacagacaaagccagccagactgctgatcaagctgccagactctgaggccctgagtcctttcactttttacagggcaaagaaaccatcaaag

SEQ ID NO: 956878 - DNA, 622 bp, Homo sapiens
ggtgagcagaataatactttccgtactccaagctcttgtggcagagaaaatcattctgatggtggtgccttcaggagcacagtaaccacttgctagagaaggcaggtgctgagttcagccgaggttccaacaagggcccaaaggcatggggaagtgggttgagagttgaggggaagtcggtcgcgactgtactgtgtgacaggcactttacatgtgtgttttttctatcccagctttattgcaatataattctcataaaataaaacccactaatttgaagtgtgtaagaggtggttttcagtgtattcacagagttgcacagccatcattacaatcaataccggaacattttcatcacccccaaaagaacctggtgcccattagcagtcactccccatccgcctcttccccagcccctggcagccaccagtctaactctctttctctgtagatttgcctattctaacatctcatctacatggaatcayacaatctctggcctctttcactggccaaatgttttggaggtccatccatgttgtagtatctaccagtactttattcctttttagagctgaataatattccactgtatggatatgtcacattttatttattgatt

SEQ ID NO: 956879 - DNA, 622 bp, Homo sapiens
ggtgagcagaataatactttccgtactccaagctcttgtggcagagaaaatcattctgatggtggtgccttcaggagcacagtaaccacttgctagagaaggcaggtgctgagttcagccgaggttccaacaagggcccaaaggcatggggaagtgggttgagagttgaggggaagtcggtcgcgactgtactgtgtgacaggcactttacatgtgtgttttttctatcccagctttattgcaatataattctcataaaataaaacccactaatttgaagtgtgtaagaggtggttttcagtgtattcacagagttgcacagccatcattacaatcaataccggaacattttcatcacccccaaaagaacctggtgcccattagcagtcactccccatccgcctcttccccagcccctggcagccaccagtctaactctctttctctgtagatttgcctattctaacatctcatctacatggaatcacacaatctctggcctctttcactggccaaatgttttsgaggtccatccatgttgtagtatctaccagtactttattcctttttagagctgaataatattccactgtatggatatgtcacattttatttattgatt

SEQ ID NO: 956880 - DNA, 622 bp, Homo sapiens
ggtgagcagaataatactttccgtactccaagctcttgtggcagagaaaatcattctgatggtggtgccttcaggagcacagtaaccacttgctagagaaggcaggtgctgagttcagccgaggttccaacaagggcccaaaggcatggggaagtgggttgagagttgaggggaagtcggtcgcgactgtactgtgtgacaggcactttacatgtgtgttttttctatcccagctttattgcaatataattctcataaaataaaacccactaatttgaagtgtgtaagaggtggttttcagtgtattcacagagttgcacagccatcattacaatcaataccggaacattttcatcacccccaaaagaacctggtgcccattagcagtcactccccatccgcctcttccccagcccctggcagccaccagtctaactctctttctctgtagatttgcctattctaacatctcatctacatggaatcacacaatctctggcctctttcactggccaaatgttttgsaggtccatccatgttgtagtatctaccagtactttattcctttttagagctgaataatattccactgtatggatatgtcacattttatttattgatt

SEQ ID NO: 956881 - DNA, 703 bp, Homo sapiens
gatgaacatttcctacaagagccccgacagaagattcagaacatcatagcacctttaatggcataaaatatctagcatatagtagaagcctagctattttgatttcctttgctgatctcagacaacctcttccaccacaccaatgtgcaaagacagatatggacacattctgccaagaaatcttaggttgaggactcagaagtcacagaaatggaaatatatatgcctgataattcatctgataaaattaactagaggatgtagcatacatatctcctcaggcatttaaaaatcaacattattgatctttaaagtatatgaagttaacaggacaccttttaaatgaacatatctgtgatttttgagcaacatatatctatatatgcaaccccacctctatgaagatgtatctgcatcacccagaaagtccctcactcccctctgcaatgcctctgtctgtcccagcaaccaatgatgtgacttctatcactggagagtcgttttgttggcaaatatttttaatgcaaatgtcaaacctcttctgaataatcctcttgaatacatagctaaatcatcaaggcagggaggagttcctggaggttttatggttttagaagtggttgaagccaggtgagctacctgacccatggtagggacaattctatctggagatggatattgtgccraaataacctcaaaaggt

SEQ ID NO: 956882 - DNA, 774 bp, Homo sapiens
tagcatatagtagaagcctagctattttgatttcctttgctgatctcagacaacctcttccaccacaccaatgtgcaaagacagatatggacacattctgccaagaaatcttaggttgaggactcagaagtcacagaaatggaaatatatatgcctgataattcatctgataaaattaactagaggatgtagcatacatatctcctcaggcatttaaaaatcaacattattgatctttaaagtatatgaagttaacaggacaccttttaaatgaacatatctgtgatttttgagcaacatatatctatatatgcaaccccacctctatgaagatgtatctgcatcacccagaaagtccctcactcccctctgcaatgcctctgtctgtcccagcaaccaatgatgtgacttctatcactggagagtcgttttgttggcaaatatttttaatgcaaatgtcaaacctcttctgaataatcctcttgaatacatagctaaatcatcaaggcagggaggagttcctggaggttttatggttttagaagtggttgaagccaggtgagctacctgacccatggtagggacaattctatctggagatggatattgtgccaaaataacctcaaaaggtcttttcggmtggtagaagctgattctacaaaatttattcattttcattcgtttattttctcgtcaattcattcaatcaaacaattttatgttacgttttgacaaaagttaatcatctttaaggaaattattttgagttcccat

SEQ ID NO: 956883 - DNA, 607 bp, Homo sapiens
aaattaaaaacattttgatacaagactgggggcagggaagtgctgggtagagaagggcggggtccctggtgagggctccaccctcgggcctgtgcccacagacctaaatgaggacaggcgtttctgtttttgcactcaaaaagttgccttttggcccgccacgcctcccatcctgtgcccatataaacccgagaccttaagcggacacggacacaagaggctggacatctagaagagcagaagaatacagcagcagacaccggcagatcagcgatggcggaaggacacgaatgcgaggggagttcagccaggggaagtctgcgagagtcctgccactgggcagccaactgcaggggaaaaccaccgttccactccatccctcgacttctggctccccatctatctcactgagagccacttacaccacttaataaaagcttgcactcaacctttcagcccacatatgatctgattcttccagtacactggtcaagagctcaggctgtcacattggccccctgtccttgcaataagcagagggtctattgagttgactaatgcaacsagacggcagacggcatagctgaaagagtgcactgtaagtcct

SEQ ID NO: 956884 - DNA, 802 bp, Homo sapiens
cagctggaatcgcacggagctctgttrtaactcaaatctggccaggccgcaagtcaaagcattcctaagaaatatagtacacacatacagtgaacacaaccattgtaactctagcccatgggaagctgaacattcaatggacagtgtccagactatatagaaaaatagaacactgacccaccacctgcagaaaccagtcgagggaaaccacaacttttgcagccatcggccccaaatggttggtacttaatcaacaactgccaacttccccaagtgttgccccctgcatccaacacaggaccaaccagtgaaagctgactctgatcacataggacatctggcttctaggttagccacctccagcttcctgtgccaacagcctcaagtcaggtcacacctgaatcctcctcctcccttccctctcctctccccttccaacactataaagggttttctattcccctacttccttttgagtcttcaccagccacatgtgatgatggctgccacccttgttctagaaagcccagaatagcctctgcttcttctcatttgcattgctttttcccccatatctggttctccctgggggccttctatcctgcctgggccctctgctaggagttccttaacttttcccttctccatcctgcagcatcttcatccttccctgcttccaagggctgtgtttctgtagatgaactgtttctcccctatttgaggccagtccttccaactgtattctttcctcattatttctattccttcttcctggaccttttctttccacctgttgtatccc

SEQ ID NO: 956885 - DNA, 774 bp, Homo sapiens
  misc_feature 156: n = A,T,C or G
gcccaagttaggaagctgatggagagtcccagcaaaatacaggaatctgagcaattttatagttttataaatataggaacatgaatgagaataggaatgaagagagaggacygctttgacaatgattccaaaagtaaaatattcagagaagggtgngaatggagtctaccaagaagaaaaactggataaaggcagaataaaaacttggaataaataatattactgaaattacttagcaatgttaataatgttaaatgtgtctgtggtaggcctgaccttctggctgtccattattccatatgtggtcttttctgactggcttctttcacttactgtaatgtttataaggttcatccatgttgtaacatgtatcagtacttcattccttttttttacaagatgatattgaattgacaggatatgccatgtttgtccattcagaaattgataagatatttggcttgtttctagtttttttgtttgtttgtttgtttgtttgtttttgagacagtcttgccctgttgctcaggctggagtacaatggcacaatctcagctcactgcaatctccgcctctcaggctcaagcaatcctcccacttcagcctcccaagtatctgggactacaggcacatgccaccatgcctggcaaatttttgtattttttgtagaggtgaggtttcaccatgttgcccagactggtcttgaacttctgagctcaagtgatccactcgcctcagcctcccaaaatgttgggattacaggcatgaacgacc

SEQ ID NO: 956886 - DNA, 450 bp, Homo sapiens
gtttgtgggtttgtgatatatggctcttattattttgaggtatgttccttcaatacctagtttattgagagtttttaacatgaagggatgttgaattttatcaaaggcctttttctgcatctattgtgataatcatgtggtttttgtctgcagttatgtgatgaattacatttattgatttacatatgttgaaccagccttgcatcccagggatgaagcctactttattgtggtggataagctttttgatctgctgctggacttggtttgtcagcattttgtgcaggatttttgtatcgatgtttatcaaggacattggcctgaagttttctttttttgttgtatctatgccaggttttggcctcatagamtgagttagggagcagttccttcttttcaatttttttgaaatggtttcagtaggaatggtaccagctcttctttgtatct

SEQ ID NO: 956887 - DNA, 582 bp, Homo sapiens
ctttcatatatctttagttaattttttaaatggtgtaagaaagtagtcctgtttcaatcttctgcatatggctagccagttatcccagcatcgtttattgaatagggaatcctttmtccattgcttgttattgttgactttgttgaatatcagattgttgcagttgtgtggctttatttctggccttttttgttccattggtttatgtgtttgtttatgtatgagtatcatgctattttagttactgtagccttgtaacatggtttgaagtcaggtaatgtaatgttttaggtttgtttttttttcttaggaatgctttggctcttcaagctctttttgggtcctgtatgaattttagcataattttctctaattctgtgaagaaagtcattgggagtttgataggaatagcattgaatctgtaaatttctttgggcagtatggcaattttaacaatattaattcttactatccatgaggatggattgtagggaccagccctacagggtctgtgggtttttctactcttgtgcggaaatgagagattgtagaaataaagacacaagacaaagagatagaaga

SEQ ID NO: 956888 - DNA, 612 bp, Homo sapiens
ctgcggcggctcgacagcctcaagtccaccggcagctcgggcgccttcaggtaggggtgcggggtgggggaaggtgagacccttcttcccagggacacccctgatcctggccctcttgctgcagccatgcagggagccagttcagtcggggcggcaacgttccccacaagaagaagccccccaaggtggccagcaaagtaagggttaacaaggatggcaggccggttggaaaaggggcctcctttgtgcccctcttcctggcttgcaagtctcccagctcactgcctctggtgcttctctctccttgtgactctgtagccctcccagccccgtttctctttcttctccctttgcccccgggggaaatggggcacccccttaaccgctcctccgacctccagcagagcccactggggacagcctcagcctggccctctttgcatttgcacttttcctcttggtcctcagtcatcgtccgtggttccggaccaggcctgcatcagccagcgcttcctgcagggaaccatcattgccctggtggtggtcatggccttcaggtgacttgtccccygggctctcatggtggctgactaggggagtggagctgcccag

SEQ ID NO: 956889 - DNA, 539 bp, Homo sapiens
cgttttagcattcctgtcagggccatttgaagttaacagggacacttatgtaactgtccgaaatttaagctggcaatgtcttgacagattaaacaggtagggagcctgaagaccagtagttttcaagtcttttaatggagaaacctattcttcaagtgtaatcttatgtgaaactttaggatgtacaggttcctctggttgaagctggaatgggataaagtttacccagcaacggcctcataactagggtactttttgaaaactggtgttgacaaaaagttctatcccaagggcaggtaacttttgaaactgattttcccagattataccaagccacacaacttatttgagctctattttctgattcaggtagattgcttctaaatctgcagtaatggtgataggaactaaagacggtaagatttcttttttttttttttttwtgagacagagtctcttgctctgtccccaggctggagttcagtagtgcgatcttggctcactgcagcctcagcctcctgggctcaagtgattctccc

SEQ ID NO: 956890 - DNA, 606 bp, Homo sapiens
gcactaaagtgctatctgttgttctaagcacaagaacctgccccatggagaaaacacatgtgttagatacacttcgtgcaggcatgagataattaatcagcaatagacacaaaatgatgtatatttaaacagaaacacacataaaggagaattgtttattcattgactaataaatgtgaccagaggctgggcatggtggctcacgcctgtaatcctagcactttgggaggccgaggtgggtgaatcacctgaggtcaggagttcgagaccagcctggccaacatggcaaaaccccgtctttactaaacatacaaaaattagccagacgtggtggtgtgtacctataatcccagctacttgggacggtgaggcaggagaatcacttgaacctggagggcagaggttgcagtgagccgagatcgcaccacttcactccagcctgggcgaaagagccagactttgtctaaaaaaaaaaaaaaaaaaaaaaaawtgtgaccagaggctcacaggaccctgaccccaagtttccctaaaagcaataattcagtatccactagttctagttcagtctttgaggggaccttacagaatataattattgccaat

SEQ ID NO: 956891 - DNA, 629 bp, Homo sapiens
tgaactctccttggctggtgccatcttgtctgctccttactgtacacgtggctggcaaagaagggatgatggagcccccatcttgaacatgtctagtccctccctagtccctagttcctgctgacattcagccatgcaagctcccagcttgtttgtctgtatctgcagcttgactttataggttgctgtttggtagaaaatgattttgggctgcttttcattaaaaagaaaagccttaccgaggactcccatatccttactatctgcctaagtgatttcttcttaactcctattatcagtggggtactctaagcagcgggagtggctttgttatcccagcttggacctgtagtttttggctctcatgtaaatagaaatgaaccctggctgggtgcggtggctcacgcctgtaatatcagcactttgggaggccgaggcgggcagatcatgaggtcaagagatcgagaccatcctggccaacatggtgaaaccccgtctctactaaaaatgcaaacattagctgggcatggtggcacgtgaytgtagtcccagctactctggaggctgaggcaggagaatcgcctgaacccgggaggtggaggttgcagtgaattgagatcatgccagtg

SEQ ID NO: 956892 - DNA, 620 bp, Homo sapiens
tcgactgtgagggaatctagtcactgtgaagacgtgacaagcctagctccactgaggcctgggaaacaagggtgagttaataggttaactcaggaaagcagcatgtgaccatctgtgattggacaggaaattgcctaagacgtcaccctggaagagtctcatacactgtcccatctggcaagagcctgcacatcctgcaatgtagaagttttcaaacttttataaacctctgtatcctttacttaaacaaaatcccttttggaaagcaaatttgaaaaccaggtgaaaacagaagttctctgatggaagttggaaatagagccttggagtcccccacaacccgccacatcatgcctgctttttcctcccttctctagcaaagctccctgcatctgagtccagagctctcatgctaaatgctcacagtgtttcattaaatgtcatagttgctgacgtggattggaaactggttgcttgaaacatcttttcgttaattttttttcmtaaaataaacgaaaaaaattaaattaagttttggttaagcagccagcctagattcacatggccctgaatcttggaatttccagttaggtattcatggaagatcgtctaatacaaca

SEQ ID NO: 956893 - DNA, 513 bp, Homo sapiens
tttatctctagcttctaatattactttcctaccccattcattcattcctgacctcatgctagatcgggagagcaagtgaggtgtggttgaaggctctgctctgaagaccgacttcaggtgacatagaaacagacgggaatgtggtgactcaggtgacaacctaatctttaaggtaacaaggatgcactgcttccctctgtcagtgagaaattctcaccagtgtcatgggccaacggcctgtttttgagagcacagccccaggttcacccaactatgtgaggtcataggtgcctgttggcttggggtgaagggaggagacctggtctctcttggatgtcactgacacctggggcatccactgaagagaggcagacatgcctcggacatgcatctattctcctcctccttgaatcagggtcactgaaaggcatccggggcacgtgtgtgggttgagggatatatagactytgagatcctttccagcctgagcaggtgctgcggcccctccatgat

SEQ ID NO: 956894 - DNA, 721 bp, Homo sapiens
gaggatttttgcattgatgttcatcaaggataccggcctgaagttttctttttttgttgtgtctctgccagattttggtatcaagattatgctggcctcatagaatgagttggggagaagcccctcatccttaattttttggaataatttctgtaggaatggtaacggattgtctttgtacatctggtacaatttgtctgtgaatctagcaagtcctaggccttttttggttggcaggctatttattagtgattcaatttcaaagcttgttattgatctgttcagggaatcagtttcttcctggctcagttttgggtggatgtatgggtccagaaatttatccatctcttccaggttttctaatttgtgtgcatagaggtctttggagtagtttctgatggttgttcttagttttgtggggtcagtagtaacattcccttaatcatttctaattgtgtttatttggatcttctctcttcttcttaattcatctagctggtggcctattttattaattttttcaaaaaaccaactcctggaatttcaagccagtgggttttatcttgtgaggtgctgtggaagtgggggctacagkctgttgctgctcagccccctagattcagcctctttcctaggggtatgtacaggagtctaaccttccactttgctgaagctgcaactacttttgccggaaagcccaagtatctaaggttccaggttc

SEQ ID NO: 956895 - DNA, 721 bp, Homo sapiens
gaggatttttgcattgatgttcatcaaggataccggcctgaagttttctttttttgttgtgtctctgccagattttggtatcaagattatgctggcctcatagaatgagttggggagaagcccctcatccttaattttttggaataatttctgtaggaatggtaacggattgtctttgtacatctggtacaatttgtctgtgaatctagcaagtcctaggccttttttggttggcaggctatttattagtgattcaatttcaaagcttgttattgatctgttcagggaatcagtttcttcctggctcagttttgggtggatgtatgggtccagaaatttatccatctcttccaggttttctaatttgtgtgcatagaggtctttggagtagtttctgatggttgttcttagttttgtggggtcagtagtaacattcccttaatcatttctaattgtgtttatttggatcttctctcttcttcttaattcatctagctggtggcctattttattaattttttcaaaaaaccaactcctggaatttcaagccagtgggttttatcttgtgaggtgctgtggaagtgggggctacaggytgttgctgctcagccccctagattcagcctctttcctaggggtatgtacaggagtctaaccttccactttgctgaagctgcaactacttttgccggaaagcccaagtatctaaggttccaggttc

SEQ ID NO: 956896 - DNA, 636 bp, Homo sapiens
aacagattctgccctgttgattattataccaccattttgtaattatttggacttcattctttcttttttttttttgagacggagtctcactctgtcrcccaggctggagtgcagtggcatgatctcagctcactgcaagctccgcctctcagattcacgccattctcctgcctcagcctcccgagtagctgggactacaggcgcccaccaccacacctggctaatttttgtatttttagtagagacggggtttcaccttgttagccaggatggtctccatctcctgacctcgtgatcctcccgcctcagcctcccaaagtgctgggattacaggcatgagccactgtgcccggcctattctttctttatttttgggacagggtctcactctgttgcctgggctggagtgcagtggtgcagtcttggctccctgcaacctctgcctctcagattcaagggattcttgtgcctcagcctcccaagtagctgggattacagaaacacaccaccatgacccactaattttttgtagagacagaatctcactatcttgctagggctgatctcaaactcctggggtcaagcgatcctctcacctgggtgttccaaagtgctgggattacaggcatgagccac

SEQ ID NO: 956897 - DNA, 548 bp, Homo sapiens
cttaggcccagagcaaaacttagaaaccctactgaacttggcaacctcagttttttataatagagatcaggaagagcaggggaatgggacaaatgggataaaaaaaaaaaaaaaaggtgactgctttagtcrtggccctcaggcaaatggactttggaggctccagaaaagggaaaagctgagcaaattgaatgcctaacagggcttgcttctagtgtggtctacaaggacactttaaaaaagattgtccaagtagaaacaagctgcccccttgtccatgccccttatgtcaagggaatcactggaaggcccactgccccaggagatgaaggtcctctgagtcagaagccactaaccagataatccagcagcaggactgaggatgcccagggcaagcgccagcccatgccatcaccctcacagagccttgggtatgcttgaccattgagggccaggaggttcactgtctcttggacactggtatggccttctcagtcttactctcctgtcctggacaactgtccttcagatctgtcactatccgaggg

SEQ ID NO: 956898 - DNA, 561 bp, Homo sapiens
agcagtgaagcaggagggacgattaatggcctcacttgataccaaagcccgtctcagcaccctccacatcacagctgccgtgcatgacctctctgccacctacttctgtgccgtggacacacagtgctcccctgacgccaccagtctgtacccaaacctgcagctggtgggcccactcctcctgcaggaactatgactgtgaggcttcgttcactgtctgtacatttctttctgcaaggaaaattctgagatgggtgaaaaaagatgctgttttaccttcttaactgtggaatattttttaaaaggaaaatgtgttcaggctgagggaagattcctaaccatgtatttcctgagaatatgaggtctcattctttactgcctcacagtcagaatttgttagtcttccattatggaataattttacatgtagtgcaactgtcacaaataattcctatgaaatatggaatcattatttgttttatatrtgaatgtaacatatggcatttaccaatgaaagaaagaataaatgctttataaaagaatggtctatgtgaggttcct

SEQ ID NO: 956899 - DNA, 671 bp, Homo sapiens
atggccaacatggcaaaaccctgtctcgactaaaaatgaaaaattagccaggtgtggtggcacacacctgtaatcccagctactcaggaggctgaggcacgagaatcactggaacctggggggcagaggttgcagtaagccaagattacaccactgcattccagcctgggcaacagagtgagactctgtctcaaataaataaataaataaatttcaattctggcgtgtgtgtgtgtgtgtgtgtatgaatacacttgacagaagttgtctaaggcctgtacactaaaagatataaaaaaattctgagatacatttaagatctaaataaatggaaagagttattgtgtttgcagattagaagactcattaaaattctctccaaattgacctacagattcaatgtcattcaaatcaaaatcccaacagaaattttcatagaaattgacaagtgggtctaagatttatatgaaaatgccaagggactacaacaaaaaaattctttttaaaaaacacaaattgaggaacttacactactgatatgaatacttttatagttacaataatcaagagactatgatattgatataaaratagacaagtagaacattggaacacaataaaggatccaataataggccagcatgtacatagttgattttcaacaaaaatac

SEQ ID NO: 956900 - DNA, 605 bp, Homo sapiens
atgagactccttagtcagagacaaaggattttgttacttatggcacagcaaacagcctaaacattagtaagttcacttcagttrctctttccttaagtccccaaaagatgatacagtgagtgctgatgagtagtttgcatgcagtggtgctgtgtcatagatgaggaactctgagcctgggaaatttatagcaacagtaaacagtaagccagcttgctctttgtcgtacagggagtcattaactcatcccttaaggttgattgctgcaagcctaactctgaaaagtggtcctggtagggaggtcatggctttacactattggcatacccagcaggtcatgtaggggtacaagagactcatagtggactgtctttcaacactatccactccatggtcttatgtcatgttagctgctggaaatttttcttatgagtattccactccatcagtcattctgattaatttgactagagaggtagagagtaaacgcatagaatttgtcttacacaagatttaattaaggctactgtcagtagaactctaagcatgaagaggagaccaacctgcaatagcaacctcaatcatgcctcataggatcctagatt

SEQ ID NO: 956901 - DNA, 605 bp, Homo sapiens
atgagactccttagtcagagacaaaggattttgttacttatggcacagcaaacagcctaaacattagtaagttcacttcagttgctctttccttaagtccccaaaagatgatacagtgagtgctgatgagtagtttgcatgcagtggtgctgtgtcatagatgaggaactctgagcctgggaaatttatagcaacagtaaacagtaagccagcttgctctttgtcgtacagggagtcattaactcatcccttaaggttgattgctgcaagcctaactctgaaaagtggtcctggtagggaggtcatggctttacactattggcatacccagcaggtcatgtaggggtacaagagactcatagtggactgtctttcaacactatccactccatggtcttatgtcatgttagctgctggaaatttttcttatgagtattccactccatcagtcattctgattaatttgactagagaggtagagagtaaacgcatagaatttgtcttacacaagatttaattaaggctactgtcagtagaactctaagcatgaagaggrgaccaacctgcaatagcaacctcaatcatgcctcataggatcctagatt

SEQ ID NO: 956902 - DNA, 735 bp, Homo sapiens; identical to SEQ ID NO: 953232

SEQ ID NO: 956903 - DNA, 635 bp, Homo sapiens
ttgcttcctttgactcagggggaaaccaaggctcagagaagtgacagcaccttgttcaaggacacgcagatgatctggtccaaattgtgatgctcctgctgccacaccacaatgatttttgcayctgctgccctgtcatctggtcagaaacaccctaattttctttctttttttaatttaaagcattttttattttttaattttaggtgtgtgtgtgtgtgtgtgtgtgtgtgtgtgtgtgtatactttttttttttttgagacggagtcttgctttgtcacccaggctgatgtgcagtggcatgatcttggctcactgcaccctccgcctcctgggttcaagcgattctcctgccttagcctcctgagtagctgggattacaggcatgtgccacgacccctggctaatttttgtatttttagtagagatggagttttaccatgtaggccaggctggtcttgaactcctgacctcaggtgatccgcctgccttggcctcccaaagtgctgggattacaggcatgagccaccgcgcccggcctgatatatatatttctggatgacgtgagatattttgatacaggcatgcaatgcataataatcacatcaaggtaaatgaggtctccatccccgca

SEQ ID NO: 956904 - DNA, 635 bp, Homo sapiens
ttgcttcctttgactcagggggaaaccaaggctcagagaagtgacagcaccttgttcaaggacacgcagatgatctggtccaaattgtgatgctcctgctgccacaccacaatgatttttgcatctkctgccctgtcatctggtcagaaacaccctaattttctttctttttttaatttaaagcattttttattttttaattttaggtgtgtgtgtgtgtgtgtgtgtgtgtgtgtgtgtgtatactttttttttttttgagacggagtcttgctttgtcacccaggctgatgtgcagtggcatgatcttggctcactgcaccctccgcctcctgggttcaagcgattctcctgccttagcctcctgagtagctgggattacaggcatgtgccacgacccctggctaatttttgtatttttagtagagatggagttttaccatgtaggccaggctggtcttgaactcctgacctcaggtgatccgcctgccttggcctcccaaagtgctgggattacaggcatgagccaccgcgcccggcctgatatatatatttctggatgacgtgagatattttgatacaggcatgcaatgcataataatcacatcaaggtaaatgaggtctccatccccgca

SEQ ID NO: 956905 - DNA, 721 bp, Homo sapiens
aaagaatgagatcatgtcctttgcaaggacatggattaaggtagaagccatgatcctcagcaaactgacacaggaacagaaaaccaaacactgcawgttgttgctcacaagtggaagttgaacaatgaaaacacatggacacagggaggaggacaacacacaccagggcctgttgtggcaaagggaggaagagtattaggacaaatacctaatgcatgcagggcttaaaacttagaaggtgggttgataagtgcagcaaaccaccatggcacatgtatacctatgtaacaaacctgcatgtgctgcacatacataccagaatgtaaagtaaaataaaataaaatatttttttttaacaaagtcatgctctgtcacgcaggctggagtgcagtggcatgatctcggctcactgcaacctctgtctcctgggttcaagtgattctcctgcctcagcctcctgagtagctgggaatacaggcaggcaccaccacactcggctaatttttgtatttttagtagagatggggtttcatcatgttggtcaggctggtcttgaactcctcacctcgtgacctgcccgcctagacctcccgaagtgctgggattataggcttgagccactgcacccagccaattaaattaaatttaaaaaaaggaaaaagaaaaaatttaaaaaaagaaaatgcaaagcatcaggaaatataatcaataagagaataaa

SEQ ID NO: 956906 - DNA, 765 bp, Homo sapiens
gctgtgaatcaagctgctggtggaaaaccaccccccgcttctcactatctctcttacctaataaatatggagggctgtgtaaagctcakgtaccttgttcactagaggcaaggtgcccctgacccctttttccaaatatacccctttgtctcttgtcttttattcctgcattcaccctgctttgttcagtccaataggtctgtgtaggctacaaatagaagtgaaaaaaaagaaaaaaaacacttcacacaacaatatcagaatacacactttttccaataggtcatgaaacattctcctgagtagataacctactaggacacaaaacaagttttaccaaattttaaaatgttaaaatatgggctaggcattgtggctcattcttataattccagcattttgggaggctgaggtgggaggattagtgagtttaggagttcggcgccagcctgggcaacataaagagaccctctctttagaaaatataaaatttaaaaattagctgggcataatggcacatgcctgtgcgtccagctactcaggaggctgacgggggaggattgcttgagcctgggagatcgaggctctggttagccatgattgagccgctgtgctccagcctgagcaacagagcaaaactctgtttcaaaaaaaagattaaaatattacaatcattttttattacaagggaataaaattagaaatcaatagcagaagaaatatggaaaatctacaaatatgtggaaattaaacaacacactcttc

SEQ ID NO: 956907 - DNA, 677 bp, Homo sapiens
tgaatcaagctgctggtggaaaaccaccccccgcttctcactatctctcttacctaataaatatggagggctgtgtaaagctcaggtaccttgtycactagaggcaaggtgcccctgacccctttttccaaatatacccctttgtctcttgtcttttattcctgcattcaccctgctttgttcagtccaataggtctgtgtaggctacaaatagaagtgaaaaaaaagaaaaaaaacacttcacacaacaatatcagaatacacactttttccaataggtcatgaaacattctcctgagtagataacctactaggacacaaaacaagttttaccaaattttaaaatgttaaaatatgggctaggcattgtggctcattcttataattccagcattttgggaggctgaggtgggaggattagtgagtttaggagttcggcgccagcctgggcaacataaagagaccctctctttagaaaatataaaatttaaaaattagctgggcataatggcacatgcctgtgcgtccagctactcaggaggctgacgggggaggattgcttgagcctgggagatcgaggctctggttagccatgattgagccgctgtgctccagcctgagcaacagagcaaaactctgtttcaaaaaaaagattaaaatattacaatcatttttta

SEQ ID NO: 956908 - DNA, 611 bp, Homo sapiens
aggttcgattagcctgttcaacagtggcttgaccttgagaattatagggtattccagtactgtgctcgatgttccactgttaaaggaacgcctgtaaagatttactayagtagcctgggccattgtttgttttaatcttttgtgggatgcccatggcagcgaaacagggaagtaatgtcttaatatgagcagccgcctcgcctgtttggcaagttgcccatacaaaatgagaaaaggtatctatagtaacatggacgtatgaaagtttcccgaacaaaggtacatgggttaggtccttttgcaacaacatattgggggttaatccctgtgggttaacaccagtcctttcacgtggcagttgtactacctggcactgagggcaatgttgcacaatgccctttgcctgtctccaagtaatttgttatttttgtttaagtcctgctgcattaacgtgttagggagtgaaaatcttggacattagtaagcacagtggaaattaataaatcagcttgatcattagcccttacaaggggcccaggaagattagtgtgtgctcaaatgtgtgtaatatagaaaggaaaacggtgatcatgcactgccttttgtaaaga

SEQ ID NO: 956909 - DNA, 532 bp, Homo sapiens
ttttttttaagatttttgtagagatggtgtctcactatgttgaccaggctgaccaggttggtctcaaactcttgggctcaagctatcctgtctcggcctcccaaagtgctggaattacaggcataagccaccaaacctggcccgagaaatttaacgttgatacggtactttacactttacattcccattttggtaatttgatcacatattttattttagtctcctttaatttggggagagttcctcagcagttctttgtctttcatgcaattgaagagtataggtcatttattttacggaaggtttttcaatttggacttgtctgatttgatctgattagctttttgattgtagtcaggttatgtttagtcagaatgttacaaaagtgatgttttcctctcagattatcacatctggagatacataatgcccacttgcccctcattagtgattttaacttcggtcaagatatagtctggttcttctactctrtagttactatttttccttgtaacaagcagtctgcttagag

SEQ ID NO: 956910 - DNA, 769 bp, Homo sapiens
aagagactcccactgtagtacaaggcctgaaaaaggaaagcaaaggagcactaattagttcagtcctatttatctacacaaaataaaaatataaaaatattggttgcaaaacaatttgctggctgtcaatagactgtgtctaccccggggagaccctggttttgcttctttctggaatttgtttataaccttctgttaatcaaacctgagcagggagagatgtggaaattaggtagagagaacggacttcatgacgacctggagcagacctgggaagaattgggatgagttcgtggcagtagcttgggttgccaggtgccaagacactggccctgccttgctgggagcctggtgatagggcctttttggaatcaggccttcacacagggaatgtaatctacaggatggcaggtgtgtgaggatggctgttccagaagattccatataggtcgggctccctagaagctgagtctgagatggggacgtgtggggatgtttgggactgtggaggacataggctcaggagaaggggagtcagggaagcagtggagggcgggcaagaagcaaggccagggcgtgggctcagtgcacccaaggagagctctggagcctcgtgtgtggcaccacatggctgtcccacctcaggcagtgagatgggtcttttgcaccctgtgtcaaccmgtcatcagttgcggttgcccccagtggtagttccagccagtcagctccctcagctaaggacagttctccagacagggcacatctgtga

SEQ ID NO: 956911 - DNA, 570 bp, Homo sapiens; identical to SEQ ID NO: 954593

SEQ ID NO: 956912 - DNA, 608 bp, Homo sapiens
attgcttgtttttatcagctttgtggaagatcagatggtcatgggtgtgtggccttacttctgggcccctattctgttccgttggtctatgtgcctgtttttgtaccagcaccatgctgttttgattactgtagccttgtagtatggtttgaagttggataatgtgatgcctccagctttgttctttttgcttaggattgcctgggctagtcaggctcttttttggttccatatgaattttaaaatagtttttttttctatttctgtgaagaacgacattggtagtttcatagtaacagcattgaatctgtaaattcctttgggcagtatggcctttttaatgatattgattcttcctatccatgagcatgaaatgtttttccatttgtttgtgttttctctgatttctttgagcagtgtttgtaattctgattgtacagatccttcacctcctggttagctgtattcctaggtattttattctttttgtggcaattatgaatgggattgcctttcygatttggctcttggcttggctgttgttggtgtataggaatgttagtgatttttgtacactgatttttttatcctgaaactttgttgaagtt

SEQ ID NO: 956913 - DNA, 690 bp, Homo sapiens
aactcactcacccccacctcccaggaagagcttaatctattcatgggggatccacccccgtgacccaaacacctcccactggggcctatgatgtagtttggatctgtgtccctgcccacatctcatgtcaaatcataatccccagtgttggaggaggggcctggggggaggtgattggatcatgggggtggacgtctcccttgctgttctcatgatagtgagttctcacgagatctggttgtttaagtgtgtgtagcacctccctctttgctctcttgttccttctccagccacgtaagacttccccttcgccttccatcatgattgtaagtttcctgaggcctccccagccatgcttcctgtacagccagtggaactgcaagtcaattaaacttcttttctgtataaattacccaatctgaggtagcctgtttaaaaatttttttttctggctgggcacggtggctcatacctgtaatcccagcactttgggaggccgaggtgggcagatcacgaggtcaggagatcgagaccatcctgtctaacatggtgaaaccccgtctctactaaaaatacgaaaaattagccgggcgtggtggtrggcacctgtagtcccagctactcgggaggctgaggcaggagaatgtgtgaacccaggaggcggaggttgcagcgggccaagattgcgcc

SEQ ID NO: 956914 - DNA, 445 bp, Homo sapiens
atgttcagtgtttttggggaaaggacgatgcatgttttattcacagttatctctccactacatagctttagtaggcagatttctaagacagcccccaacattccttcccctcatggtatacaccctttataactccctctcttgaatgtacaaaggatttatgagcaagaatgatatttcactttcatgatgaggatatattttatgggaaagatgaagccattttgtatgtgtaattaaggtccctaatcagtagactttgagttcattaactgaggcattaccctaggtggactgactaatctggtgagtctttaagtcaagcgagagagatcagcagcagcaacaaatgtttgtccagygtcttgaagaagttagctctcatgtgagagtaagagtacaggcggcaaggacctgagggtgacctctgggagctgagagtggt

SEQ ID NO: 956915 - DNA, 445 bp, Homo sapiens
atgttcagtgtttttggggaaaggacgatgcatgttttattcacagttatctctccactacatagctttagtaggcagatttctaagacagcccccaacattccttcccctcatggtatacaccctttataactccctctcttgaatgtacaaaggatttatgagcaagaatgatatttcactttcatgatgaggatatattttatgggaaagatgaagccattttgtatgtgtaattaaggtccctaatcagtagactttgagttcattaactgaggcattaccctaggtggactgactaatctggtgagtctttaagtcaagcgagagagatcagcagcagcaacaaatgtttgtccagtgtcttgaagaagttagytctcatgtgagagtaagagtacaggcggcaaggacctgagggtgacctctgggagctgagagtggt

SEQ ID NO: 956916 - DNA, 654 bp, Homo sapiens
atgttagcaaccattgatactaattgcttaggtctgttaatttattggggattgctwaatggtggtattctgtcattttttcttcatttatatgctttattaatgctacaaagagacagttcccttcatttactagtgaagagacacttccctccacttactagtgggctacttagtggtacagtggaaaggcaggatcagtgtttgactctccttttatttaccagttttcaagttagcaaattggtttcctactattaataaaacctacagatggccaatcaggttttacttttcattctttaaataattataaacagaaggatttaaatgtttgataggttttactctattgcaatttttatgcttgttaaagcttatatcctacatttttggtgagtgaaaacttcttcaagtggctaaaaatgaaactgagttcttttgacgcaaatttcttttgataatttctttgttatctgggatgacaacatgtttctggttcatcttgttcatttcttggccagacctggaggtagccatttttccagaaatccctggtttagtttagtgggaaatgacatttaagactataatccagcgttagggtgttttgtcccactgaacccgctgctggagtcacctcaaaagtggcgt

SEQ ID NO: 956917 - DNA, 613 bp, Homo sapiens
ctcagttcaaaagaacttagtgagaaagttaccccctcccttgacaattcttctaatgcattccaggcaagcctcaatacactgttagtgtgtccttacagcccttcaacacttggtaagaaggaactgagagtttccattcagatagcttttggctagtagcagcatctagccagacttgaacatggtttagttcctgtggttccctgctatttatagagaatgacataaacttcttaatatctttaatgtatttaagtaaataacaaggtcttaagaagatgtggccaaacactataaagggatatgaggatgacagagttcatgaaaccctgcccagtaaagtccaggaggccagagaccaagcatccagctggttctcagctatgtccaccatacttggtattatttgttggctgtgtcctcaaccaaatcttaccttgaattgtaataatccccacatgtcatgggcagggccaggtggagataagtgaatcatggggtyggttttccccatactgtgctcgtggtagtgaataagtttcatgagatccgatggttttataaaaaagggcattcccctgcacaagctttcttgcctgctgccatgtaa

SEQ ID NO: 956918 - DNA, 580 bp, Homo sapiens
acttcactcccctgctacctccactggagcaggtactggtatccrcagctgagagacctgaagacagatcacatcccaggactccttgaagacactccccagtaccagtccagagtctggtagctctactgggtggctagatccagaagataaagaacaatcactacagtttggctatcagaacgccctatccctgggggaaaggggagagcaccacatccagggagcacccctgtgggacaaaagaatctcaacagcagcccttgagtcccagatcttccctctgacatagtctacccaaatgagaaagaaccaggaaaacaattctggtaatatgacgaaacaaggttctttaacatctgcaaaagattacactagctcaccagcaatggatccaaaccaagacgaaatctctgaattgccagaaaaagaattcagaaggtcgactcttaagctaatcaaggaggcaccagagaaaggggaaatccaacttaaagaaatcgaaaacatgatacagggtatgaatggaaaaatctccagtgaaatagataacatgaattaaaaaaaaactatcacaact

SEQ ID NO: 956919 - DNA, 599 bp, Homo sapiens
tttatccctgaaatgcaaggatggttcaatatacacaaatcaataattgtgatacatcacattaatagaataaaaaaaccatatgatcatctcattagatgcagaaaaagcatttgataaaattcaacatcattttatgatgaaaaactcagcaaattagatgtagaaggaatatatcccttcaagggtaccactgagtgaaaatgtaaaacagaaaaaaagaaagaatgtgccttaacgcaataaaggccatatataacgagaagcccacagctaacattatactcaatggtaaaaaattgaaagcctttcctgtaagatatggaacaaggcaaggatgcctactcttcccacttctattaaatatagtattgaaagtccttgccaaagcaattaggcaagagaaagaaagaaaaggcatccaaataggaaaagaagtgtaattgttactgtttgatggcaactttattckatatatatatatatatatatttgagatggagtcttgctccgtcacccaggctggagtgcagtggtgcgatctcagctcactacaacctccacctactgggttcaagcgattctcctgcctcagcctc

SEQ ID NO: 956920 - DNA, 703 bp, Homo sapiens
ccgtgagtccagggcaggatttagtccacagagtggccaacctggcctaggaagcctgagggaagtgtatgcattgctctgacactcccatcgcgcaccccgccagccactgcttttgcctcccccgccatctccaccttgttaactccttcattctccacgcccagtcatcaatcaaatcaggcctccatgctcaggcctgagcgcaggacaggacagtctgttaagggatcaggtgaagcaaaggagcttgttagatccagctctggggtcatcttaggccacacctagctgcatgccacctccaattctagaactcccccagggccagcctgaggcagccatgtctgcctggggccggctgtgctccactcagggctggaagatggctgctgggctcctctcctcctccccacaactccctatgcctgggtcacctgcctcttgctgccctccaacccccgactcactatccctgtctcccttaggtggcaaagcagcagaaagagtctgaatccacccagaaggcagagaaggaagtgacgcgcatggtggtggtgatgatctttgcgtactgcgtctgctggggaccctacaccttcttcgcatgctttgctgctgccaaccctggytacgccttccaccctttgatggctgccctgccggcctactttgccaaaagtgccactatctacaaccccgt

SEQ ID NO: 956921 - DNA, 544 bp, Homo sapiens
tctaagaagctggaggctcctggactcttgggacgactgaagggcgggacttggctcccaccagccctcaggagcagtggccaccccctgcttcctgcaagctccttcccaccttccagggctctgcccstgtgatgcccatccccccctgcccatctacctgcccagctcctcttctcacaggcatcttcagctcagccctctggcctgtggggggcagggttagtgctcatagccaccccgacttggggcctgccctgcctggtggccctggtcgtagggctgtgctaatcacgcctggagcggctgccttctggagtgtcctggagagaactcaggagggcggccgcagcccaggttgcctcgacgatgggcctgtgcccacaggactcgggtaccctgccctttggagatgggcactggtgggtaggcagatactgggcttgctttctttctggcaacggagaaagtgttttggaatgtggggccctgtctgagcagggctgagttattcgggagcagaggagaagggatatccggggga

SEQ ID NO: 956922 - DNA, 585 bp, Homo sapiens
ttaagaaaataattccacttatgatagcatcaaaaagaataaaatacttaggaataaacttaactaaggaagtgaaagatttgtacatggaaaacaatagaacattgatgaaagaacttaaagaagacacaaatgaatggaaagatattctgggttaatggattggaagacttaatattattacagtgtccatactacccaaagcaatctacagattcaatgcaatacttatagaaatgccaatggcatattttacataaataggaaaaacaattctaaagttcaaagggagtcacaaaagaccccgcatagccaaaacaatcttgagaaagaaaaactaagttagaggcattatacttcctaatttcaaaatgtttcacaaagctacaataattaaatctgtgtcatttttaatcttgtcttcttctaattagaacagaggtgcttagagaaatgagatayaattttatttgttgtggtaaagccctgtgatttcatatatatatatatatatatatatatatatatatagtagttatatattagttagtgttcatggttagagtgctacttatatattactct

SEQ ID NO: 956923 - DNA, 624 bp, Homo sapiens
aggggccaatgtacagctcaggccattgtttcagggggtgcaagccccaagctttggtggctcctgtgtggtgttggccctgtgggtgtgcagaagtctatagagttgaggmttggaagcctctgcctagatttcaaagaatgtatgaaaataccttgatgcccagcagaagtgtgttgcagggacagagccctcatggagaacctctactagggcagtgcagaggagaaatacggggttggagccctcacacagagtacccactggggcactgtttagtagagctgtgagaagagggccaccattctccagaccccagaattgtatatccaccaacagcttgcaccatgcacctggaaaagccataggcactcaatgcctgcctgtgaaagcagctatgggggctgtaccctgcagagccacaggggtggaggtgcccaatgccttgggagcccatcccattcatcagtgtggcctggatgtgagaaacggagtcaagggaaattattttggagctttaacatttaatgactgccctgtgggtttcagacttgcatggggcctgtaggctgtttatttggccaagttctcccttttggaatgggggcatttacccattgcctg

SEQ ID NO: 956924 - DNA, 628 bp, Homo sapiens
ctattttctgcctccagctcaaacattggctcttcctgggtctcaatcctgataacctgtgaactagaactataccattgggtctcctggttctcccacttgttgactgcaaatcttgaaacttgtgagcctccataattgcatgagcgaattccttataagaaatctgttgatgatatagatatagatctataaaagataccccctaatgtttgtttctctggagaacctgactaatacactcataatttctattatgaatatttctactcatgtgttccctttttaatctcattctggatttctattatccctctcttactagtcagtgattctatattaatgctgcctaaccatccaccccaaaatgcagtatcatgtagtaacagacatgcatgtctcactcacatgtccacatattggctgaggttgctcggcttggggctccaggtcagatcagctctgccccacatatctctgcttgggactcagatcagagaaggatggcttccyagtacatactgctgctttagtggtgttgtgcagaagaataatgccctgtcttcctcttttgagtacagaatctattgaaaaattgtaccaggggtcagaaatactagctttattt

SEQ ID NO: 956925 - DNA, 666 bp, Homo sapiens
ttgccagcaaagacaggctccttcctagtgctctgtgcttccaggtgcttcagtgccttctctaggctcatggrggagctgtctaccactgcccatgtttccactggggcccatctgagcagcacggctgccactgggtaccacaacccatgttgcggccacatggctgacccaggatcatcaggggctgagggctctctcaactcaggatcctgctgactatgccaattttcaggtttcaacctaagttggggtccaaagggagctggtggatgggtggtgggtagctgaaagaacacttgagggaccataggcacttgggacatggctttattctcccccatctcccctacagagtcagaagtgcagttatatttttcacagacaacagtagctgaaagccagatatgagctcacacaaacgagttatattaaagggctgcagtgtgattacatagtgctcaaagccggatatgagctcacacaaatgagttaaagggctgcgatgtgattacatagtgcatgggattgtgcgcctgcactccaaacctactgtatcatgctgcactggatgtctgcctaggcctactcctgagtggagcgcagccattttccttacatgctctctattgcattttcacattattcattgtatttttcagctcc

SEQ ID NO: 956926 - DNA, 763 bp, Homo sapiens
cacacaaacagccagggcaccatgaacaagggcaggaggcagacaggctcctgggtagaaaggggcagggtccccagtgaaacctcaccttcaagccagggatagactgaagcctgacagccgggctgccagttctgcagactggagtgagaacttatggtggtttttctgggcccgcccacggaccaatcagcatgtacttcctcccctctgaagcttataaaaaccccagactcagccagacttgggcagaaaacaggacaacctgcctgcagagaggtgctacccactgtgggtctcctttccactgagggctgtatactcatcaggacaacctgcctgcagataggagctacccactccaggtctcctctcctctgagggctgcacagacgatgggatgatctgcctgcagaaaggagctacccattttgggtctcctgagagctgtactgtcactcaataaagcacctcttcttgcttaccctccagttgtctgtgtacctcattcttcctggacatgggacaagaacttgggacccactgaatggtgggactgaaagagctgtaatacaaacaggctgaagcacaccccccaactcaccacgttgtgggtgatgagaaggagagaagagaggagataaragctgtggccccttggggagccgagacttaggacctcccccagccaaggctgtgacaccctctttgaagctctgtggttcctgaagtctccaagcttctgggcgccaccgcattccct

SEQ ID NO: 956927 - DNA, 832 bp, Homo sapiens
acccagacactgtttgtaatagactggaaataaaatgttctttycttaccaccttgtcctagtccgttgcccagccctctccgcctcctcgcccaccctccacgtggggcctctgcctggatgtgaagtccccgggcccggcttccctggcctttatctcagagagtgcgagaggcctcatctgtcttgtgagccttgggcctgaatgctgtggtgtgcggagaggcagctccgggcagcccccggctggatgtgcatgtgtggtgtgtgcacgtgtggcacattcctgggtgtgtcctggagaccacagtggggtctgcagtagtccctcaggcatggggctcctcaggtcccggtgagggcggacctccaggagggggcttggctctgagccagggcccctgccctgcctgtctccctacatggggccgagttccaggcttgtctcagtcacccctgcacatctgtgtggtgcctgcctgccccctcacccgccaccctgttgtgggtgcctgcctgtccctttgcctgccaccctgtcagggactgactctgagcggggagttctggagggcttctgcagcagtgcctggtgagcaagcgtgggctttggggactgagtttgggccacatccactacctgctggctgggtgaccctacaagccccgcccctctctgagcctcagtttcctcttgcaaacgggatgacagaccccgcctcactgggctgcactgagggtctgatgaggtcactcttcaggcgctcaatagctgcccgtcaccattacccctgctgctgtcacctccggaggtggccgcgccagtcttgtt

SEQ ID NO: 956928 - DNA, 457 bp, Homo sapiens
tgagaagagggtggacagaggtagtgtgatggtgacctggaaaccctgggcmctggatgaagtgctgaacaaatgccagggggtattaatatacaaaagaaatcccagccatcctgcctgaaatgctgaacaaagcacttcctagaggcatctaataaagcatgtacaaatgcctaaaaacaggaatgtgagtgacatcaacctgtagtcaaatgtgcatccctaatatccaaattatagaacccagtcatattccttgggagcatttgggggacagggttttctctttggcataattaaggcaaagtcctacagcatttcccaaagcagatacaagaataatggcatctgaatcaactgtggttttgttaaaatgcagattcctaggttatgccccctgtctgactgaactagaatcctaggcatgagactcaagcatatgaattataaacaaatt

SEQ ID NO: 956929 - DNA, 564 bp, Homo sapiens
ataaataaaaatgggattgcaagtaagatcagatattaatctctttcccatattgctgagactctgaaacagtaatatggtactaaatttatacagataatggyttgattgacctaccctattcagctcttcttccattgaggttttgttcaaatagcttttaaatttatttctgatgaggctactagggtgtatgctatattgctaatatgttttttcaccaccttgaatactacatcaaccctaaagagttcattgttctagctgttctactcaaatatccatgggtctctctactcatggccatttatctacctatgaattttctgggtacaggaagaccaagagtaaaaggagacgatgaagatttttagtttgctgaaagggacataaaacaacctgaaaatgacacagaaacacctttaatagagtgctaaattgtgtgctaaagcaaggtcagagtggaacaacaaggtacagtgggaagagcaaaggctttgtaatcttaccgacttagttcacacccatgcccatcacataatgtctctgagtctcacagtctcc

SEQ ID NO: 956930 - DNA, 564 bp, Homo sapiens
ataaataaaaatgggattgcaagtaagatcagatattaatctctttcccatattgctgagactctgaaacagtaatatggtactaaatttatacagataatggcttgattgacctaccctattcagctcttcttccattgaggttttgttcaaatagcttttaaatttatttctgatgaggctactagggtgtatgctatattgctaatatgttttttcaccaccttgaatactacatcaaccctaaagagttcattgttctagctgttctactcaaatatccatgggtctctctactcatggccatttatctacctatgaattttctgggtacaggaagaccaagagtaaaaggagacgatgaagatttttagtttgctgaaagggacataaaacaacctgaaaatgacacagaaacacctttaatagagtgctaaattgtstgctaaagcaaggtcagagtggaacaacaaggtacagtgggaagagcaaaggctttgtaatcttaccgacttagttcacacccatgcccatcacataatgtctctgagtctcacagtctcc

SEQ ID NO: 956931 - DNA, 641 bp, Homo sapiens
aaaagcctgcatccctctaagcttccgtktctttctttatgaaacaaaaggacacgtccacacgttctatgaagattagagagctgtgccatactcaatttcaacagctgtcctaaatgatgtcattgttagtgtcattattgacacgaataagaaaagtaaattttgatcctgataagggaaagagtcccggggatcaaaatgtcattcccatgatttggtgaagactttcctcaattagcccagagctcagaagccctgagaaggaagcagggagtgaccagggcaagcaaggaaatttactctctgttcatgaatagaaacagaaaccaacaggaatatcctgtgatttatgaaaatgctgggatttaaaatcattaagtagtattttgctttcataggatatggagctaagaggaatggcagaagggattttaaacacagaaggggctagcgtgcaattaaaaaaatatataaaactaaaaatttcactgtcgaatttctttctcattgtactcatccagtatagaagaatttttaaaataatataatttttaaaaagacatctgggagaggggtattaaaataacagcctaagatttgtgctaacctgccacttctctcacatatccatgccacag

SEQ ID NO: 956932 - DNA, 564 bp, Homo sapiens
ttgatttttggaaagatttttgtgtctatctccttcagttctgctctgatcttagttatttaaggattgtaggacaaatgcttgtctatcacaagaaaacatttttattaactgaaaattaactgtagmtttaataaatttgaactcggagattttaaaaaaatacttatgcaagtgagtcagattttgtttttaaggggaaggagtgattgtccctcaaaggaaaattattgaccacttctatcacacttttatgtttctgaattgttctttgagagagaatagcttttaaaaacatcaaaaactctagatcttaacaatctaaggacccaaaacctttcagtgtacaattatagtattattgaaaaatagagaagaatgcaaagaggttgcataattgagtataataaagagtaacataatagagagtggagagggagtaagagctgagtatgagcaaaatagaactagtaggtgagaggccatgggcaagtagaaacatgtctagcaataaaagtaaaaagaagaaaaaaccataaaatagaaaacaaaggtaagaggaag

SEQ ID NO: 956933 - DNA, 423 bp, Homo sapiens
cagtgtcccaaatgaggaaagagagtaatgaatggacatcaccatggggtcaccaagtgatagatacatcttaaagcttcacatggctgggaataaaatgacacaaatccattggactggcctctgactttagtacttccattttctatcccatcaccttcacagtcagcacctgcctagagcgtggggtcaccccaattgtgtcagtttctaatatgaagggcaattttgcccccaaaggacccctggcaatacttggagacacttttggttgtcatgacttgggcactggggtgctacyggatccagggggcagaggcaaggaatgccactcaacatcctcagacaggacagcccccgcaacaaaaaactatctggcccagaacatcatgagtgctaaggttgaggcaccttgctcagaag

SEQ ID NO: 956934 - DNA, 466 bp, Homo sapiens
tcatgaaaaagcccgtgtattagaatatctagaaaatatttttaatcaactgtcttatatatgctcgaagaactaaaggaaatcrtaaacaaaggactaaagaaaaagagaagaatgtctcagcaaatacacaatatcagtaaagatgtaaaaatacaaagagatgtagaaattataaaataaatagaaattctttatttgaaaagtacaataactaaaagtcactagaggggtacaacagtaggtttgggcaggcaaaagaatcagtgaacttaaaataggtcaattgagattattcagtccgaggagcagaaaaataaaagtaatgtgaaaaatgaacagagcacacctatgcatgatgggggttcaacaaggagagaaacagaatagagaagaaagaattttcaaaggaaaaatgactgcaaattactcaaacttgaggaaagacactaatcgatgtatccaa

SEQ ID NO: 956935 - DNA, 475 bp, Homo sapiens
gaattccttaatcagggtctcacaaagctaaaatcaaggtgtcagctacactgagatcgtatctggggatcttgacaaaaaataatgtattaccaagctaattcctcttggcaaaatttagtttcttgtattgtaaactaaaaataaaatctcagccccccaccgactgaacagaccacttcttggccaaggggactccagagaaaccttaaaaactgagttcctggctgtgagaggatgctaggtcagacacgcctcattataccccctcccttttacaatttagacaaaacaactgaccatagttaatgtaaaaatatatatcattaatgctaatagaatggactctttgtggcaataagatacaaaattataaacaggacctaaggccatagcaggtaagggttaagtcatgcatgcctggacttaaagagtaaactatgtttkaactgctacaagatttttctttttgtct

SEQ ID NO: 956936 - DNA, 483 bp, Homo sapiens
aaaatggctttggctattctggatattttgtggttccatacaaattttaggatttttttttctattttagtgaaaaatgtcrttggcatgttgttaggaattgaatagaaattgtaggttactttcagtagtatgaacattttaacaatatcagttcttccaatccatgaacatagaatatttttccttttttaggtgttctctccatttttttcattagtgctttataggttttattacagaattttttacttcttccattaattcctgggtattttacttgtagctattgtaaatgagattatgtttttttatttctttttcagtttgtgccctgttacatatagaaatgcactgacttttgtatgttgattttgtatcctgcaactttactgaaattgtttatcagttctaatactgttttttttggtgaagtcatgagggttctccaaatataagatcatatcatctgcaaagaaggtt

SEQ ID NO: 956937 - DNA, 483 bp, Homo sapiens
aaaatggctttggctattctggatattttgtggttccatacaaattttaggatttttttttctattttagtgaaaaatgtcattggcatkttgttaggaattgaatagaaattgtaggttactttcagtagtatgaacattttaacaatatcagttcttccaatccatgaacatagaatatttttccttttttaggtgttctctccatttttttcattagtgctttataggttttattacagaattttttacttcttccattaattcctgggtattttacttgtagctattgtaaatgagattatgtttttttatttctttttcagtttgtgccctgttacatatagaaatgcactgacttttgtatgttgattttgtatcctgcaactttactgaaattgtttatcagttctaatactgttttttttggtgaagtcatgagggttctccaaatataagatcatatcatctgcaaagaaggtt

SEQ ID NO: 956938 - DNA, 444 bp, Homo sapiens
tctttgttaaatttatctgttagaattcttaattccttccttaggttatcttgagtttccttaaaacagctattttgaaaggtcacatatcactgtttytccatgattggtccatgttgccctatttagtttgcttggtgaggtcatgttttcattaatcctcttaatgtttgtggatgtccacccatgtctgggcatggaagagtttggtatttattgaaatcttcacattctgggcttgtttgtgcccatccattttgaaaaagctttccagatatatatatatatactgaggattttgatgtaagccatatctgcaatagagggcactccaagcccaagaacactgtggttcttgcacacttgtagaggtaccaccttgttgccttcgataagttctggaagaattctctagaccacaaggcagagacacttgttttcttc

SEQ ID NO: 956939 - DNA, 680 bp, Homo sapiens
gggaagatgatgaggtactaaggagtctgattctttgtttgcttctgccaataatctggtgtctacctctctaggcctgtttctgtatctgtaaaatgagggagttcaacttggtaacccacagctctctcctacttctgaccttgtgtcttaccataatctgagttcctaaacaactccctgctgcctggttggataggtagctctatgatctcatggcacacttgactatcccactgtagttctttccaccaactattattttcttgtgtttttctcccagaagactgggagctccttgggaacagttctatgccttgttcactgttgtatcttcagggcctagcatggagtaacagacattctgccaatgtttggtgaatatttgaaggaaggagggaaggaaggagaggaccctgcccctatcctccaaacacttgatcatcacactatgacacataagatgtgaggcaaatggagaatgtcagtggagaattcatgattaagcacacacccagaacttggaaacaaggtcatctgtcttactgaagccatacattcatgcaccatgcttgtgcttagccatctgtggtaataaatcaagacacagcaagggcagagttgaaaatctgggaataccaragcccaaactagttgacctgggggtaatctttgaatgg

SEQ ID NO: 956940 - DNA, 596 bp, Homo sapiens
taccttgtagattccaaatttagttcctctacagcaggggtctccaacccccaggtcatggaccagtactggtccctggcctgttaggaaccaggcctcacagcaggaggtgagccgtgggccagcaagcattaccacctgagctccgcctcctgtcaggtcggtggtgacattagattctcataggagtgtgaaccctattgtgaactgcacatgcgagggatctaggttgcatgctccttatgagaatctaatgcctgatgatctgaggtagaacagtttcatcctgaaacctacccccacaccccatcggtggaaaaattgtcttcctgaaaaccggtcttggtcccctggtgccaaaaaggttggggaccactgctgtgcagagaattaacttgtttgttggttgaagcaacaaattaattcagtctctgtctcttctgcagttagcatcagatgaaatattttagctaaggctaaaagaactgaagctctctgttytccccaccatgtatagttcaggggtcagccagatgtttgagccaaagttatatacagaatttgtggcactctgtttgcgactttcacctttcagt

SEQ ID NO: 956941 - DNA, 596 bp, Homo sapiens
taccttgtagattccaaatttagttcctctacagcaggggtctccaacccccaggtcatggaccagtactggtccctggcctgttaggaaccaggcctcacagcaggaggtgagccgtgggccagcaagcattaccacctgagctccgcctcctgtcaggtcggtggtgacattagattctcataggagtgtgaaccctattgtgaactgcacatgcgagggatctaggttgcatgctccttatgagaatctaatgcctgatgatctgaggtagaacagtttcatcctgaaacctacccccacaccccatcggtggaaaaattgtcttcctgaaaaccggtcttggtcccctggtgccaaaaaggttggggaccactgctgtgcagagaattaacttgtttgttggttgaagcaacaaattaattcagtctctgtctcttctgcagttagcatcagatgaaatattttagctaaggctaaaagaactgaagctctctgttctccccaccwtgtatagttcaggggtcagccagatgtttgagccaaagttatatacagaatttgtggcactctgtttgcgactttcacctttcagt

SEQ ID NO: 956942 - DNA, 595 bp, Homo sapiens
aacagtaacagagtacttctgctcgagaaaaccagaagaaaaataaggggacattgtcttgcaccttatatacaagcttagatgcaggatgttagggaatcaagtagackcttgggagtcctgattccaggttttggctctagaacagcttttatggaccttcactgggccagaggggagcacacttctctgaaaggtgagtcctaggactggcagcattcaccacaagatcactgaagggccttgggcctaaagtcaacattagcaatagcctggctgtactccccataggcctctggtgatggtggccatgggattaggcacttcttcctgtggaaaggggagggaggagtgagaaagaatgcaatttatggtttgagtgccagctcagccacagtaaaatagaacagtagatggatttctcaggttttttattccagacctgggctcccagatggcatctctggactcacgtggggtctgggggagcttgctttcctgaagggaagctcataagcctggctggattcaccccatgctaattatagagtcccagggccttgaggtaacatagggtgtagccagggaatggtta

SEQ ID NO: 956943 - DNA, 564 bp, Homo sapiens
actgactaatacagtaaattggtactggtagagttgggtgctgctgtaaagatacctgaaaatgtcaaagcaactttggaactgggtaacaggcagaggttggaacagttaggaggactcagaaagagacaagaaggtgtgggaaagtttagaactttctagagactgttcagtggctttgaccaaaatgctgatagtgatatggacaatgaagtcgaggctgaggtggtctcagatgggtatgaggaacttgttgggaaatggagcaaaagtcgcttttgctatgctttagcaaagagactggcagcattttgcttctgccccaaagatctatggaactttgaacttgaaggagatgatttagggcatctggcaaaagaaatttctaagttgcaaagcattcaagatgtgacttggatactgttaaaagcatttagttttatacattgacaaagatatggcttggaattggaacttatgtttaaaasggaagcagagcataaaagtttggaaaatttgcagcctgatgatggattagaaaagaaaaacccattttctgaggaa

SEQ ID NO: 956944 - DNA, 573 bp, Homo sapiens
gagaacatctcactactgggagaacagtaccaagactttcatgagggacctacctccatgagccaaacacctcctaactagccccaacaccatcacattggggatcaaatttaaacgtaagtttagggagkataaaccaacagtatcaaagtaataacaaagacctcatcattaatgtataaaaacagaactgatttttatatgttgatttggtatcctgccactttcctaaattcattcactagttttcattttttaagtgcctttaaggttttctacatataaggtcatgtcatgtacaaaacgagacaattgtgcttcttcctttctgatgtgggtgccttttgtttactttttttcctaattgctctggctaagtcttctagtactatgttgaatacaagtggtgagaataggaaaattcaaaaatatgtaaaaaataaataacacattcttgaaaccaataagtcataaaaaaatagagaaattaaaaaatatatcaggacaaatgaaaatgacaacgcatcacacaccaaacttatgagatgcagcaaaagcagtaataatttggaa

SEQ ID NO: 956945 - DNA, 571 bp, Homo sapiens
gattgaaatgatcatatgactttgatgcttcattctattcatataatgtatcacattgattcatttgtatatgttgcatcatccttgcatcccagggaaaaatcctgtttggtcatgagaaatgatctttttaatgtatcctggaattttgtttgctagtattctgttttggatttttgcatcaatattcagcagatatattggcctatagttttcatttttgatatgtctttgtctaggtttggtatcagagaaatactggcctcatagaatcagtttgaaattatgccttcatctatttttcagaatagtttgagtaagattggtattagcgctttaaatgtttggtagaattcagtagtgaatccatcagttcttgggcttttctctactgggagactttttattatggctgtgaacttgttacttattggtcagttcatgttttgtatttcttcttgattcaatcttggtagtttgtatgtatcgggcaatttgttcatttcttctagattttccaacttattggtatatagttgttcatattagycacaattgatcatttgaattt

SEQ ID NO: 956946 - DNA, 536 bp, Homo sapiens
tgtcacagacttgatggaccgcttgacaatggaactgggacttcttttccagacagccaggaacagtttgccttcatgggagggcgacaatggactttcacagtgttgcggtggtgtcatagtcttattaatgatgttatgctaacctctgattcttttacaggtttaaaagcgggaatgcccctcttgcctgggattgggataatgaaactgaggcagccttttccaatagccaagcaggctattcggtagacataagccctatgggtagttgaccaggggtgctcatttaagctggatgtgcatgtgaccacagatagctttggctagggcctatatcaatgcatgaggcacttgggagtgacagtatgcttttagtcccaactatggaagggagctgagctctcatactctgatagggaagcagttagcagctatatatgcttcccttcaggctaatgagagcatggcaggacagatgacttacccaatagcgggatgggtgcattmataggtaacaagcccccagaatggga

SEQ ID NO: 956947 - DNA, 584 bp, Homo sapiens
atttcttttacacacataataaccatttctgtcacttttcatttgttggatgtctatccatattttcatctggtatcatttttcttctggaagaactctttttaatatttcttgatgtatagttctctttatagtgaattttatagtgaattttttggtctgaaaaagtctttatttttccctcatttttaaaagataattttgcttggaatataattttaggtttacagtgattttcatttaatgtttaaaagatgtcactccattatcttccggattgcagattctgatgaaaagtgttctatcaatccttgttcctctgtttttgcactgcttttaagatttttctgtttttcactaatttttatccaaatgaataataatatgccttgaaatggtttatcttttttctgcttgaggtttattgagattcttggatctctaaggttattttaatcagatttggaaaaaaattggccattattattttgaatacttttttttttwatctattctctccatctgccttgttgttttctggggctccaattacaagtatttttgactacttgatactgtcttat

SEQ ID NO: 956948 - DNA, 585 bp, Homo sapiens
ccccaggagctctgtcccagggaaatgggggttttgtttgtaagcccctgactgggcctgttacctttccttcagagataccctgcccaatgaggaggaatctagagaagcagtctggccacagccgctttgctgcgcccaacccagatctcccagcctccttagcactgttaggggaaaactgcctactaaggcctcattaatggcggatgcctctgcccccaccaagcttgatcatcccaggtcaacttcagattgctgtgatggcaaaaagaatttcatgacagtggttcttagcttgctgggctctgcgggagtgggagccgctgagcgagaccacttgactccctggcttcagccccctttccaggggagtgaacggttctatctccctggggttccaggctccactgtggtatgaacaaaatctcccatggctagctcggtgtctgcccaaacggccgcccagttttgtgcttgaaacccaggaccctggtggtataggcacatgagggaatctcctgatctgcagattgcaaaaaamcgtgggaaaagcatagtaacctggcagggtaacacaattcc

SEQ ID NO: 956949 - DNA, 655 bp, Homo sapiens
tgcagatggccaataaatgcaatgcagtgatcattttgatccrtttttaaataaagcttattaattacttgaaaaaattatatacagacatggcaaaaaaggtaaaagatatcaaaaggaaatctggaaaaaaaataattctaaacctcaagcctcctggtgataagatttctttgtacttgtctggaaatattctataaatataataatgtaaggtgatagaaatgggtctcattctgtctcagtctgaaatgaatcaagaagacaaagttgctatttcccaaagtgtgctatgagagactgctatagtcaagacctagcagactcacccatgtattatataacaaggttaggttgctggagattagggaagttttttgaaatggtggtttctttggaaaatgttgtgtcagcctactctggccttttggtagataggtctggtaagagagtctatgggacacccagtgaggtggggcctggtgaactggtgctgatccctagggcatctgtaggtgagcatcccagcctttggggttggcccacatcccagagtttatccaggctcagaatgcaaatgcttcctgtggactacagttgggctgtatgggagaaaggctggctttgagccacttaaaaatcttacatgggggag

SEQ ID NO: 956950 - DNA, 594 bp, Homo sapiens
gagagacattgccacctccactgccaccaccacggtccacaccatcatcatccctcactggaccatcgccatcatctcctttgaaaattccccttgcccaggccaaatgtcaggctkatttcctcaaaatctccggaggtaccagtgtctgttgaagctctgcaggcagatgtgtgcagcccaggttggagaggtggtgtctggccatctctcttttgcgttcagccaaacttggtcctgcctcagtgactttgcacttgctgttcctgctgcttggaacaattttcctgaatattgtctgtggctggttgcttcaggtttcagcccagatggtccctcaatacgggctttttccaagtacctgatatacagtggccactcctccctgtccgctctgggaagtctctactgaaatcccctggtttattatcatttttgttaccaccttcacctctctgaaattacttgtctgttaatatatttactgcctttctcctccactaaaatataagctcataagactaggaaccttcagtgtcttgctagggaggcaatttaccagcatgtttaaaaatgcaagctctctgtccttag

SEQ ID NO: 956951 - DNA, 571 bp, Homo sapiens
agaagtccctccaggctgcccttccagtcccagccctggccggacaagaggctgtggaggacaaagggtgcatttttcccagggcccggggcgggtgggctggggagactggcaggctgcttctgcctcgcccagggggcctggccctctagacccactgcttttgttccctttccagccacttgatgtctgcaaggccagtttgctttgctggggacagatctcagcactggactctgaccctgcaacaagggggtggttgtatgtgaagaaactgttccagctttgcacttagcttcccctgtgggctggatttgggagtcacaggggactctgtgtcaatgttcttgcttctcactctccagggtcacacggggcacgcctactctcacatcgctttgcgtctctgagccacaagtgctgggatgaggagggactgtgactggaatgctcttagaatggagtctcatctcatccaccaaagcctactgaggcccagagagggagggtggctggtccagakcacacagtaaggtgtaagaacaccaggattccctcgatctccttgact

SEQ ID NO: 956952 - DNA, 626 bp, Homo sapiens
tattttttctgttttctcttcatgttaaaaagccaaggcccttctagccatgtttgaggtttggaaatgcttaccaccagatttccattattattattattwttttttttaaaaaaatttttattattttatttttagagacaaggtcttgctccactgctcaggctggagtgcagtggtgcaatcatagcctactgcagcctcaaactcctgggctcaagcgatgttcccacctcactctcccaagtagctgggactacaggcatgtgccaccatgcttggcgaattttttaattttttgtagaagcagggcctcactatattgcccaggcttgtcttgaactcctggcctctaataataatagtagtcgtcataataaatgtaattattaattattattattgttattattaaagctctctaaatggcattttactctgtgtaaaccagggaagaggtgaaggagaacccagtgctctagctgtggcccactgctgtgatgttgatgagcagcctcctgggctcctctctgctgttttctagctgctatttccatgggtcagttaggcagcaaaggcctcctgcagtctctaacggctccttaggggagaacatgctgggtaat

SEQ ID NO: 956953 - DNA, 650 bp, Homo sapiens
gaggcgggaggattgcttgagcctgagaggttaacgccaccgtgagccatgatctagccactgcactccagcctgggcaacggagtgagaccctrcctcaaaaaaaaaaaaaatagtgaaatcaggataaagaactgattcatgagtcgagattaaaatgtaggttataaacatgttgagtttaaaggtgccggtggcttagccaggtagaaatgcgtagcatgcatgttatttgtgaaattgagagtgagccaaggactttaacttcgtgtaaatgtacctagattgatatactacctcctcatagctttcctacagtacattgtaacctcactagaatgtcgatagcataagacaaggatagacataaagtcaaatactttactccattattaatccttagaagaatgggtgtggcgactcataggaaacatatgtcttaagacaaaatatatgtcttaaagttcagatgacactaataaccatagagccttgatgattgccatagagtaaaactataaatttttttaaaactaaatgtcttaaatgacactaaactatgcattgaaatactatataaggacatttatatgccttttttcttcatcatgctgaggattttgttgactctgggttctttacgtttcttt

SEQ ID NO: 956954 - DNA, 487 bp, Homo sapiens
ttagagcaaatatcatttctatcttgtttataaattatacaattgccagcatctgtttyctgttagttcttcacccacaccaaccccactgctgattataggaagattgggattgaaaaacatcttagaatcagtccagaaactctatttggaactggatgcaattgcagaaatgttgatgcagttcaaaatgaggaatgcttattgcttaagatctgcttctccatttgtagtaattcattttgtagaggattccctcattcatgaggatattgcttcccacctggattcttactgtgctgaatcctatccgactcgtggttgtggtttgtatctgtggagggtattgtgtaagagttaggttaagtaatatctccagttatttattcaatagaacagtcagttctaaagacagttgttttttactgattctctttttcttttgtaaattattatgaaatatttcagacatgtaagataacataat

SEQ ID NO: 956955 - DNA, 481 bp, Homo sapiens
cccccgggccgcggccagctgttggggagggggtggccggccggccccagctgccgcctcgcctcgccgtgggacctgggggctgggcccggkgccagggcgtcctgggaacggcggcgccccgtggctgctctccgcagcccaccccgcccgggcccccgactcgctcactcaccccacgcatgcacactcctggccggaggcgatgctgcgctccggcgggcgggcgcgcagagcgacgggcacgcactaccgcggccaggtcgcgcgcccgcctctgccacgcccgtgcacacgcgggacacacgcgcgcgcaccgcacacaaacgcacgcacggcccctgcacgcgcggcctgagcacacgtgcgcgcacacccacgcacgtacacaggcacgcacgggcccccgtgcacccagcgcctggtgctcgcccccgcgcaacaggtgggccctccgtgggccctggcacctcaccacctc

SEQ ID NO: 956956 - DNA, 571 bp, Homo sapiens
ctctcccaggctgaaattgtataccagtggttcaattggtctagggcctcaggggtggccttaccctactgcttcactgggcattgcgcagtgcartctctccatggtggccctgcacatggtggctttctgcctacgcactgtggctttccagagcatcctttgaaatctaggtggaggttaccatgcccgcacagcttttcagagcacagcactcactaaaccaggatctgttggagccatacctggggtagcctaggagccctgtgatggaatgtggagagcagagcctcaaggtggcccatgatagtgagtgctgaagccccacaagtacctgcagcccctcctttgaaatcattctgtccctcatgcccttgtattccgcacctcggataggagtggcagccctgatctgaaatgtctttgggtcattctttcattgccttgatgaatagcacccagattccactgagatggttgatccatactaatttcctcatccgatggttacatagacacaccactggtgttctgtcctgaacatgatttcttagttttcacaatatggata

SEQ ID NO: 956957 - DNA, 757 bp, Homo sapiens
agggtgggtgggatgtcagctctgacagggccacccccaggaagctcagatctcccactgggacagggagccagggttaagattccatctgagccagcatcttttctagggactgcattggctctgcagaggggcttctgggcttcagggatttcagctcggggggtgctctggtgagagcaagggctgctgagagcaaagcctagccccatgcaaagtgctttgcaggactcagaggaggggattaagaacccgtgggaacaaggagccgcacagaccagtcaggtgaggttgcagcagggtcatcagagcctccgtttcttcacctgaaaatgcacatagcaaaccttgccttacaagggctttatgaaatgaaatgagctgctgtgtgtaaagcgattgctgtactgtttggccgaagctttgttattgaaagcattgctttccttacaggcttgaattgcacctgagttccaaaggagaagttgacattcttccagaacatatgcccagtgtcttcaacttgagatggagctgggatgccaagtctgcaaatgtgggttttgggcttggacaagcctgggtttgcatcccaactctgccctttgctgggactgtggccctgggaaaaatgagcctttctgaactttcctgatggcactcataaatgggagacagtatcgatgtcaggctgtgagcatgcatgctgcacatagtaggtgtttaatgatgtttctsaataacaaatgatttgaaa

SEQ ID NO: 956958 - DNA, 480 bp, Homo sapiens
ctataatcccaacacttcgggkggctaaggtgggaagattgcttgagcccagaagtctgaggccatcttaggcaacatagcgagacttcgtctctacaaaaaaaaatttaaaattagccaggcatgctggtgcatgcctgtagtcccagctacttaggaggtcgaggcaggagaattgcttgagcccaggagttcgaggctgcagttagctgtgatcacaccactgcactccagcctgcacaacagagcaagaccctgtctcaaacaaacaaaaggaggcaataggagattctactaagaagagagaaattacaacctcatgtaacctaatcaagaaagtgacatcagttttgccatgttctatttgttagtagcaagtcacaggatttgcccacaggggattacacaagggcatgaataccaaaagatgtgaatcaatggaggccattctagagtctgcctgccacagatacttggagg

SEQ ID NO: 956959 - DNA, 480 bp, Homo sapiens
ctataatcccaacacttcggggggctaaggtgggaagattgcttgagcccagaagtctgaggccatcttaggcaacatagcgagacttcgtctctacaaaaaaaaatttaaaattagccaggcatgctggtgcatgcctgtagtcccagctacttaggaggtcgaggcaggagaattgcttgagcccaggagttcgaggctgcagttagctgtgatcacaccactgcactccagcctgcacaacagagcaagaccctgtctcaaacaaacaaaaggaggcaataggagattctactaagaagagagaaattacaacctcatgtaacctaatcaagaaagtgacatcagttttgccatgttctatttkttagtagcaagtcacaggatttgcccacaggggattacacaagggcatgaataccaaaagatgtgaatcaatggaggccattctagagtctgcctgccacagatacttggagg

SEQ ID NO: 956960 - DNA, 623 bp, Homo sapiens
acagctaacatcatacttaatagtgaaggactaaaagtcttcctcctaagattggtcacaaaacaaggacattcactcttgccatttctattcaacwttatgcttgaggttctagctggggcaatgaagcatgaaaaagaaataaaagcatccagaacggaagggaagaaataaaactgtctctattcacagagaaacatgatcttgtggccacaaatcaaggaagccaaaggttgccaacagccaccacaagctacaagaggcaaggaaggattccctgtttcctctccctcaccagagcctccagaaggaacacagccctgccgacacctgaatgtcagatttctgacccccagagcagtgaaaggatacatttctgttatcttaaaccaagaagcttgtgataacttgttactgcagcctcaggaaattaacacaataatcaaagtgcttgaaaccaaagacaagaaactttcaagcaattggggtggaggaaagggcacattatcttcaaagaatcaacagtaatgctgatagctgatcattcaacatggagaaattacactgagtagttatgttgctgagattatgaatgggtttccatagcttcctgcaacagattc

SEQ ID NO: 956961 - DNA, 649 bp, Homo sapiens
acaatagtgacattgtctataggagccattggggacgtcatgaatcttggccatatgactcctgagcagtaagggatgatggaaactaggtctacattttagcagaattcaggcccctctgttatccgartctcatggacttttctttagtttagcaaaggtggtttcagtttccaagcaaggaaggaagcagttttagggagggactattactgtctttgctttaaactataaactggacctaaaggccaggtgcagtggctcacgcctgtaatcccagcattttgggaggctgaggcgggtggatcacttgaggtcagcagtttgagaccagcctggccaacatggtgaagccccgtctctactaaaaatacaaaaattagctgggcgtggtggcgcatgcctgtaattccagctacttgggaggctgaggcaggagaatccttgaaccccggaggtggagttgcagtgagccgagatcgcaccactgcactccagcttgggcagcagagcgagactccatctaaaaaaacccacaaaacaatgggccaggcatggtggcgggtggctgtagtctcagctactcccagctacttgggaggctgaggcaggagaatggtgtgaacccaggaaagcggagcttgcagtg

SEQ ID NO: 956962 - DNA, 658 bp, Homo sapiens
ttccggtagcaggaagcatcctgtgctgaatagaacgggcgtggaggcaggaggaggagcaggacgccgggcactgctgatgctgctttcgctgggggtgagctgggcgccctgcctcggttctcagggttggggtgcctggcaaacagagggccacaaaccctccttggatctaggcacaggaattgagggacaggctggattgggaagggtttagcggcttctgtgtggtctcctgggaagtggaagagtcaggaagactggataatgagggcttgaataattgagagtcgctggtatttccgcaagcccatttgccttggcaacatgcgcttctgccactccagggtggagcagcccctggccctgactttgggccgtcagagctatgctcggttgcctaccagggagtgacagggcgcttgggaggtttccacgaccctgcctgctgcaccgtcggcttcatttcctcctttgttagaaagttgagggtggatttgggagaacggatgtggctccgacatgttcctgagttgaggactctaagggaggagggggaagctgggggarggggcgggctcatcggtgaggttccagattcaggcaggggtgtgacaaggcacggagggacttttgggagggatggttgggatgagtg

SEQ ID NO: 956963 - DNA, 569 bp, Homo sapiens
ataggtaatgatgcatctgggcccagagagaggcagctctcagccttaggtcacacagcagggcaggagtgtgaactctggcctccagcctccgaggtcccctcatcccacctaacccccagactcagagaaggacactccacccaagcaatttctcaccttccccttaattggtacagatcagaaacgggagcacctccttctcctggcccccacgtttagggttcccaggacagcctccgacccaccctctgcccctcctgtatccctttcctcggccctgggtgacagcacccctgcccagaccagctctgactgcctccaagtgccaagcgctcacagtcctctacccccagccccagccggcaccctcagtctcgtcccaccatctctctgcctcctgagtccctccctgagtcccatgccctctgccccagcgactgcccttgtaaagwgaaaatccgaccccacccaacatttcctgctgcacttatgcagtatccaggcctcctcgccatggaaagcccaggcctgcggcctctctggcttcttctctcccttgccccact

SEQ ID NO: 956964 - DNA, 640 bp, Homo sapiens
atgctttcccgcccgcgcacctccctctggcactttcttgccaccgactccactatctccagcaaacacatgccctccgggcaggaggactgaggttagtgaacactggggacaaacgtggagggttctggaggcttgttctcaggagaggggatgggtggccgagcccatgctttggtgtgagaacaccatagttctgaaaaaaaagagataagagagttcattgatcctagcagacagaaagcaacgtccatgagagcatgtggggtggtgcgcggtgatggtgtcattgcatcgctgagcagtcaggagaaggaatactgggtccttgactgcagcccattgctagtctttagagtgcctttgtgcaaagcaaagaaggtgcccctctggacaaattagaaatgataagagtccccgttggagggacgtgatgctgagggtgtgcagcttggcaagggctggcgctagtccacctccctgctcagcacctttgtgcagtcaactatctatgcaacccaaccttatccagaagccctgcagggagggttctgtaragagagttagttcattggaagatggttgtgtcaatcatcgtagacctgccaatcagatgccaaggtggtaaattggaattaag

SEQ ID NO: 956965 - DNA, 765 bp, Homo sapiens
cagcagtggcggccgctccctcctccggtttcatttcgcagtggggatgctcctaaatgaacctgctccagaaactgaagtttgaaatggagctcctaactcattttgtcacgcagctgagaaatgccccttttaatggaaagaaacagaaaaggacaattccatctttgattgatggactgcattacggggtataaataaaaggaagtgtgataacctcactgtggcacaggccaaccgcagagtccctaactggggtggctgtgtctacatgggactaccagaggtggccatgcatggcctggtggtcagggcagggagcatcgatggagagcttgcaccccgtgagtgggactgccagagggcccccaagacatccccaacgtgagcgtttcacttttcaggtggggaaactgaggcccaccatggtctgtcccaccagaggttgtctcgtgacaaacccaggcacaggaattcccacccaggtcttcttaggagctagaacattctgcccacttcttcaccatttgtcgtctcctggaaattattggaaattaaagtggatttgtcaacactcgactgagcaatgtctttgatgttgcagaggaaatttggtctttgaattcgagtgggagccccactgtccaccaagccccagtggtgtgtckggggccctctcctgcagagcacagggcatgggacgcactgtgccgtcattcctgcaggctgcttcccgggcctggggtcgccagtcttttttgacca

SEQ ID NO: 956966 - DNA, 765 bp, Homo sapiens
cagcagtggcggccgctccctcctccggtttcatttcgcagtggggatgctcctaaatgaacctgctccagaaactgaagtttgaaatggagctcctaactcattttgtcacgcagctgagaaatgccccttttaatggaaagaaacagaaaaggacaattccatctttgattgatggactgcattacggggtataaataaaaggaagtgtgataacctcactgtggcacaggccaaccgcagagtccctaactggggtggctgtgtctacatgggactaccagaggtggccatgcatggcctggtggtcagggcagggagcatcgatggagagcttgcaccccgtgagtgggactgccagagggcccccaagacatccccaacgtgagcgtttcacttttcaggtggggaaactgaggcccaccatggtctgtcccaccagaggttgtctcgtgacaaacccaggcacaggaattcccacccaggtcttcttaggagctagaacattctgcccacttcttcaccatttgtcgtctcctggaaattattggaaattaaagtggatttgtcaacactcgactgagcaatgtctttgatgttgcagaggaaatttggtctttgaattcgagtgggagccccactgtccaccaagccccagtggtgtgtctggggccctctcctgcrgagcacagggcatgggacgcactgtgccgtcattcctgcaggctgcttcccgggcctggggtcgccagtcttttttgacca

SEQ ID NO: 956967 - DNA, 641 bp, Homo sapiens
tgaagccgatgttcacctaccattctgaaaatcytaggtcctaagaattatgcagtagctgctcttcctgtgctctatggatggaagaacaaagccagaatggcagcatgtctgtttacagcatgatttatggaatattttaaacccacagttgagatctactgctcagaaaaaggtttctttaaaactgtactgctcaagccgggcacggtggctcaagcctgtaatctcaacactttgggaggccgaggcaagtggatcacctgaggtcaggagtttgagaccagcctggcacgcatctgtagtcccagctactcaggaagatgaggcaggagaatcgcttgaacctaggaggtggaggttgcagtgagctgagattgcaccactgcactccagcctgggcagcagactgagactctgtctcaaaaaaaaacaccccaaaactaaaaactgtactgctcatggacaatgcgcctggccacccaggagctctgatggagacgtacaaggagatgaatgttttcatgcctgttgacacaacatccattctgcagcccatagatgaaggagtaattttgactttcaagccctattatttaagaaatacatgttgtaaagttataggtgccatagaaagtgat

SEQ ID NO: 956968 - DNA, 733 bp, Homo sapiens
agaaatggacccttctggtcttaaagcttaaaacttamatttgttttatctgagtttcttcctcaggaaagaacccccaagcctctcaaaaagtatcaaagaactgaaactcaccagatcaccacatccagacaatgagacaccaggcctcttgttcatcgtgattgcttccttatcaccccttagttcctgttttcccacacatagttatatttcttccctgctaaataaacccctcattttagtcagtaggagagatgaatttgagactgatctcccatctcctcagctgcaagcccccgattaaaggcttcttccctggcaatcctcattgtctcagtggttggctctctgtgggcaagcagcaggacctatactgaatccctggcatttcagtaacaatgtgattagattgggcccatcctgaaaattcaggataatctccccagtataaggtccatacatttaatcccttctacaaagttaaaattacgtattcccaaattccagagattaagacatggtcatcattaggaggccattctgtttacctcaagatctatcattcatttttagtttctgtataaagtgtgagacttaggttaaggttcaatttttgcctatggagatccagttattccaacatcatttttgtaaaagaccattatttctctactaaattgtgtttgcttgttggcaaaaataaatttgcttttgtacttgtatgggctta

SEQ ID NO: 956969 - DNA, 669 bp, Homo sapiens
tttagcatggctggggaggtctgaggaaacttacaatcatggaagggacctcttcacagggtggcaggagagagaaatgccgagcaagtggggaaaagcccgttataaaaccatcagatcttgtgagaactcactcactaccatgagaacagcatgggggtaactgcctccatgattcaattacctcccaccaggtccctcccacgacccatggggatgatgggaactagaattcaagatgagatttgggtggggatacagagccaagccatatcattctgcccccggcccctcccaaatctcatgtcttcacatttcaaaacacaatcatgccttcccaacagtcccccaaagtcttagctcattccagcattaacccaataaaagtccaagtccaaagtctcatctgagacaaggcaagttccttccaccgatgaacttgtaaaatcaaaagcaagttagttacttcctagatacaataggggtacaagaattgggtaaatacatctgctccaaataggagaaactggccaaaacaaaagggttacaggcccyattgcaagtccaaaatccaatagggcagtcatgagaccttaaagttccaaaatgatcttctttgattccatgtcttacattgtggtcatgctgatgcaagaggtgggctttcac

SEQ ID NO: 956970 - DNA, 711 bp, Homo sapiens
tttgaaaattaattcataatatagagatgaaatatttagatatataaatttatgtatctatatattttctaaatgttcaaagccatcagttcagcaacatggtggrttcatgaattatgtatcctgtctccattagtgtcagaaatagatgcatgcttctatgctcaattgatttttgaaaggcaccaatgtgattcaaagtacagccactatgagaaatagtatggaggtgcctcaaaaacactaaaattagaactaccatatgatccagcagtcccacgactgggtataaattcaaaggaaatgaaaccgatttgttgaggaagtatttggtcctccatgttcattgcagcatcactcacagtagtcaagatatggaatcaaactacgtgcacatcaatgaataagctcaataaagaaaatgtggtatatgtacataatgaatactatccagcttttaaaaagaaggaaatcctgtcatttgtgacatgtacaaacttggagaacattatgtgaagtgaaataagccagaaatagaaagacaaatactgcatgatctcacttatatgtggaatctaaataagttgaactcatagaagcagagagtagaattgtagttaccagtgctcagggatgggagtgaggtgggatggggtggggaaatgttagtagaagaatagcaaattttagttacataagggaaataagttc

SEQ ID NO: 956971 - DNA, 711 bp, Homo sapiens
tttgaaaattaattcataatatagagatgaaatatttagatatataaatttatgtatctatatattttctaaatgttcaaagccatcagttcagcaacatggtgggttcatgaattatgtatcctgtctccattagtgtcagaaatagatgcatgcttctatgctcaattgatttttgaaaggcaccaatgtgattcaaagtacagccactatgagaaatagtatggaggtgcctcaaaaacactaaaattagaactaccatatgatccagcagtcccacgactgggtataaattcaaaggaaatgaaaccgatttgttgaggaagtatttggtcctccatgttcattgcagcatcactcacagtagtcaagatatggaatcaaactacgtgcacatcaatgaataagctcaataaagaaaatgtggtatatgtacataatgaatactatccagcttttaaaaagaaggaaatcctgtcatttgtgacatgtacaaacttggagaacattatgtgaagtgaaataagccagaaatagaaagacaaatactgcatgatctcacttatatgtggaatctaaataagttgaactcatagaagcagagagtagaattgtagttrccagtgctcagggatgggagtgaggtgggatggggtggggaaatgttagtagaagaatagcaaattttagttacataagggaaataagttc

SEQ ID NO: 956972 - DNA, 641 bp, Homo sapiens
gtaaatccatccagtcctgtgcattttttggttggtaggctagttactactgcctcaatttcagaacttgctctttttctagtcagggattcaaattcttgttgtttcactcttggaagcatgtrtgtgtccaggaatttatccttctgttgtaggttttgtagtttatgtgcacagaggtgtttatatattatctgatggttgtttgtatttttgtgtggtcagtggtgatatcctctttatcattttttattgtgtctatttgattcttctttcttttcttctttattagtctagctagcagtatgtgtattttgttaatttttttttcaaaaaaaatgctcctgcatttgttgatttgttgaagggtttttcgtgtctctacctccttcagttctgctctgagcttggttatttcttgtcttctcctattttgggggtttgtttgcttttagttctctattactttaggtgttatgttaggatgtggatttgaaatctttctagttttttgatgtgggcatttagtgctataaatttccctcttaacactgctttagctgtgtctcagagaatctggttcgttgtctctttgttcttattggtctcaaacaacttcttgatttctctcttaatttcat

SEQ ID NO: 956973 - DNA, 561 bp, Homo sapiens
tgagtccttgttgaggggaagtaacaaatagtttgagacttccctcttacacccagcccccactcagagggcagtggctctgccccaggcatgccaggctgagaatatgagggccccaggtcaggctcacatagttgaatttccaaacttgaagagaaaagagaagaagatcagaagctacttcagagactttgctcgggggaaatttagtccacaagaatgcagactgccaaagctctcccccagtagaattaacttcaaaacacagtgttcaaaatagtgtgttcaaaccaaaagaatctcttgaaaataaggaagattgtggtggtgggaaatcaaagggcccatgctccatcagaacaagctaaacataagctagctagtttaccagacagaaccaggaaaagagacagctaagagagccctcttggggttcaaatgaaccttamatactggcttaaaactttcccttcctgaatttaattttatcaaattatggagcaacttatgtaccagggaatagggggtgaaaaaacaaaaacatacccagcaatgagtaaa

SEQ ID NO: 956974 - DNA, 575 bp, Homo sapiens
caagagatcccccttcctcctgcaacgtcctccagctccctctactgagaaagtttaagagtgtgctcactataaaggaaagatgcttaaagaaaatctgtccattatcacagagcaggtattgagaggcttggaattgattggcaataaattgataacacacaggggtagcctataagcttcattttgactattggaattctagatagtttattggagacatgactcatactaagttggtcttctttgtagatatgcaggttggccttactggtaaagaagtatgaaaaaagatagatacatatttaacctttctgagactcactttcttcattgagacaatggatattaaaaatcctacctcacaggtttgctgtgagaattaaggaagaaagcatatgtaaaaccctcagtgcaggcatgggccataggaagtgcagtcatgcaccacaaaacaatgttttagtaaacaatgaaccgcatatacaatgacagtcctataagattataatacagkatttttatatgtatgctttatatgtttagataaacaaatacttaccattgggttataa

SEQ ID NO: 956975 - DNA, 595 bp, Homo sapiens
agtactggctcttcctctcactaccaccacaattcccagctttcaaaatgagattcaacaaggacaatgaccatgacaggccaatgaattttcaaaacctctctttggtcctcaataatgaaagtcagttcattaagtcagcatccttaaaagcagtgttcaaatgataagtaggagcttctgaaattggcaggcaaatgatcactgagttaaagagttattataaatcatacattaagaagcaaaaaggccgggcactatggctcatgcctgtaatctcaacactttgggaggccaagatgggttggatcacttgaggtcaggtgttcgagaccagcctggccaacgtggtgaaaccgtgtatctattaaaaatacaaaaattagccaggcatcatggcgggtgcctgtaatcccagctactcgggaggctcaggcaggagaatcacttgaacccgggaggcagaggttgcagtgagcccactgatctccagcctggggaacagagcaagactccatcttaaaaaaaaaaaaaaaaaaaaaagaagcaaaagactgggtgtggtagctgatgyctgtaatcacagagctttggg

SEQ ID NO: 956976 - DNA, 574 bp, Homo sapiens
accataagctgaccatgtcacttactaatgtctaaaactccactaactcagggatccagacaggatcatgtccaaactcctcaacaaaccattcttacacagtatctccattctcatccctccatccctcaaaactgcaactctttatactcatccttccacctctgttccttctcttaatcttctccatctcaataaaaggtactatccaggaacacagtagagaatctgggtatctctccttcccacacaccctcaattccaatccaccagcagttcccatgagctctatgtcaaaaacaggtcccaaatctgatcactctcatcatcctcacagccacaaccctagtccaagatgccactactcctctgctagattctaatagcttcccaatatatctccccttctgcattttcagccccttctactcaattattcatataatcatcagagcaagcctttaaaaactgaaatctgattgtgttgcctctcacttaaaactgtccaatggcttcccatgtcatgcagaagaaaacccaaaccccttggyatggcctacaaggctttatatga

SEQ ID NO: 956977 - DNA, 591 bp, Homo sapiens
ccattctattattgctgtaaggaaatacatgagacagggtaatttatatagaaagctaacttaattggcttatggttctacagattttacagaaagaatggtcttgtcacctgcttggcttctagagaggtctcaggaaacatacaattatggaggaaggaggcatgtaaggtgaccagagcaggaacaagagaaagagagagtgacagagaggtaacaaacacttttaatgaccagatctcatgtgaactcagagcaagaattcacttatcaacaacagaatgacacaagtcatttatgagggatccacccctatgatccaaacacctcccaccagaccccaactccaatattggggattacaatttaacatgagatttggatggagaaaaatattcaaactatttcaccaacttttcaatggaattgtttgatttttgcttgttaatttattaaagttttctatcgattctggatattaggcttttgttgtatgcagtttgccaatawttccccccattctgtaagttgcctatttactctgttgatacattattttgctgtgcagaagctctttgatttaattaggtc

SEQ ID NO: 956978 - DNA, 593 bp, Homo sapiens
tgcgtgctgggagaaccactgctctgttcaaagctatcagacagggacatttaagtctgcagaggttactgctgtctttttgtttgtctgtgccctgcccccacaggtggagcctacagagacaggcaggcctccttgagctgtggtgggctccacccagttcaagcttcccggctgctttgtttacctaatcaagcctgggcaatggcaggcgcccctccctcagcctggctgccaccttgaagtttgatctcagagtgctgtgctagcaatcagcgcaactccatgggcgtaggaccctctgagccaggtgtgggatataatctcctggtggggcgttttttaagcccttcggaaaagcgcagtattcaggtgggagtgaccctatcttccaggtgccgtctgtcacccctttctttgactaggaaagggaactccctgaccccttgcgcttcccgagtgaggcaatgcctckccctgctttggcttgcacatggtgcacgcacccactgacctgcgcccactgtctggcactccctagtgagatgaacctggtacctcagatggaaatgcagaaatcactcgtcttctgt

SEQ ID NO: 956979 - DNA, 608 bp, Homo sapiens
accatgctaaagaggccaaggtcacgtgtctgctacccatgtgaaccagttagcatcattmtctcctacagccacaacatacaccctgttgtaaacatatatccttttttactcggaaattaaggcaaacaatcaccttttctggaaaaaaaatgtatctactgatgtcaaatattataatcagattttattctttagaaaatagttattgtctttcaaataatattttcaatcatccattctttcttccaatacttactgaatacttaccacacaccagtcgataatctcaaaaggctggccccaaagaacaaataaatagagctatgcgtggtattcaatatagccaaggtgtatataggtatggtgacagcacacagaaggaaaggctacttttagaagatgccatggagaatgagcaggagttcatttaagtaaatgaggaaggtaagagcattccatggagggagaacaaagatttacaaagggatggtcataagacaacataacaaacttgaactttgaagaattttactaaggccaggttcagaattgagagatatgaccagctaagagaaggcaaggcaacatcttttagattttctacc

SEQ ID NO: 956980 - DNA, 551 bp, Homo sapiens
ttaagaaagagggttgttcaagacaaaccagaaagtccaagcatgtcacgaatggtctgtgtaagtcacaataagaggatttgtaaaaaaaacccaaaaatttttatatgatcaagttgtctataattaaagggaaatcacatggtctttctagagattgggcttgatgtaaaaacaatttatggccgggcgcggtggctcacacctgtaatcccagcactttgggaggctgaggcgggcggatcacgaggtcaggatatcgagaccatcttggctaacatggtgaaaccccatctctactaaaaaatacaaaaaattagccgggcgtggtggcgggcgcctgtagtcccagctactcgggaggctgaggcaggagaatggtgtgaacccaggaggtggagcttgcggtgagctgagatcgagccactgcactccagcctgggcaacagagcgagactccatctcaaaaaaaaaaattttrtacactaaataattggatagaacaatgaaattttcttaaaggattaattgactcaataaattataagaga

SEQ ID NO: 956981 - DNA, 734 bp, Homo sapiens
gaacatctgagcccccactgtttcatctttagaggatcccagctgctggggtgtgaggccagtgctggagccagcagtctctgacccagaagggacctgaggtgctaaagaaaagtaagttaccctctttgctaagtctccagacctgctttgagcataactgtgcttattggttaccacatttgtatttggtgcagggagttgtacttagtggctggagttcatatttgggactagagatcccgtaggaatctacagaggagttaagagttttaagtcctaaggaggcaatgtaagcagactgaggaatagaaaggagaaagcaaaaggggaagagaattgatggtaaacagggtacctttggggtctttccaaaatggagaagattcaaaaggtaaggcttccaatggtggctgcatttgccagtacacatcttccatcctctcttcttctggcattggctccatttcctacaccctgtctatgtgatgtaagtgggagtggccccatcctacccagatccagcaatgagcacatgagtcaggcttggccagtcactgaagtgcccctggtcagcatgattggttcatgcttgaacacctcactttaattagcccaattggcatgaattccagaacttttcagggataataaaaaaccatagctcttttttttttccacagggatcattatctataaarataatttaagcttggggatgcaagaatctccat

SEQ ID NO: 956982 - DNA, 664 bp, Homo sapiens
ttataaaggggagtttccctggacacagtctcttgcctggcaccgtgtaagatgtaactttgctcctcattcaccttctgccatgattgtgaggcctccccagccatgtggagctgtgagtcaattaaacctttttccttgataaattacccaaccttgggtatgtctttattagtatcatgagaacagactaatatggtaaattggtacacatagagtggggtactgccataaagatatccaaaaatgtggaagtgactttggaactgggtaacgggcagagattggaacagtatggagggctcagaagaagacaggaaaatgtgggaaagtttgaaaattcctagagacttgttgaatggctttgaccaaaatgcttatagtgacatgaacaacaaggtccaggctgaggtggtctcaaatggagatttggaatttgttgggaactggagtaaatgtcactcttgctatgcaaagagagtggcagaattttgcccctgctccagagatccgtggaactttgaacttgagagagatgatttagggtatctgggggaagaagtttctaagtggtgaagcattcaagaggaagcagagcataaaagtttggaaaatttgcaggctgatgaygcaataaaaaagaaaaaaaccattttctgggaga

SEQ ID NO: 956983 - DNA, 657 bp, Homo sapiens
cagtgggagtgagacaggtctagtcaactgcatggaagctgggtgagtctatctctgccagctttgccccactttcctggtgacaggggcagccataattccttctgaaacataacccattggcctgagtaccacggcctcatccaccccccacttagctagacatccccaaggagaatctgagctcagacccacctaaccctgcctctacctgatggtatttctctacccacctttggtagctgatcacaaaatacataaactcttgggagctttatggctctggtcatagcctaagaaacccaaatacttatcctggccaacttagggcaagcttgtatccccacttctactatcatagctagtgctttcttgaaagtgccaccttctggctggaggccaaccaactcaggacattacagcaactcatgacagaataaccctgctacaaggaaagagaaaagaacagctaattccactgccttctacatcctgggtaaccagagatcctgagtctgtccatgtgacaacttcactgctagcaaacccagtcttggagaaagccagaacaataaacatatcaccaccaaggattctcacagartctacttcactccccttctacatctagcagagaaggtgctggtggcaaggcag

SEQ ID NO: 956984 - DNA, 601 bp, Homo sapiens
ctaattggggaatttagcccacttgcatttaaggttaacattgttatgtgttaatttgatcctgtcatcttgatgctagctgcttatttggcacactagttggtgcagtttcttcatagtgtcattggtctttgcattttggtatgtttttgcagtggctggtactggtttttcctttccatatttaatgtttccttcaggagctctttcaaggcaggcctggtggtgacaaattccctcagcatttgcttgtccgaaaaggattttatttatccttcacttatgaagcttcgtttgaccatatatgaaattctgagttgaaaattcttttaagaatgttgaatattggcccccactctcttctggcttgtagggtttctgctgagagatccactgttagtctgatgggcttccctttgtaggtcccctggcctttctctctggctgcccttaacatttttttctgcatttcgaccttggagaatctgataattatgtgtcttgggtttatcttctcgcggagtatctwacgtggttctctgtatttcctgaatttgcatgctgccctgtcttgctaggttggggaatttctcctggatga

SEQ ID NO: 956985 - DNA, 596 bp, Homo sapiens
cccaatatcataaatgacttcctccctgcaaaccatttttttcatatgttatgtccttgaaatttaygtatcaatgaaccaaataacttagcatttgaactcgtttcttattatttcgtagagaatcattgttcgttcgttttttttttctttttcatctcaaccagtctttcacccagtgtggtccatagactacctgcttcagaatcactgtatgagcctataaaagcagcatattcttggacctcaacccagacctactaagtgaaaatctctgagggtagaagcttgttacttgcatctttcaaaagttatccaagtgattctgattcacaataaagtttgagaaccactgtcctatgtttttcatgtttttgctcctacttttgcctctttctgggatacaatttctccaaacctgtttagaaattccgcatgtgcttcaaggctcacctcaaatgtaatcttctttacaaaaaccttcctctcctgcttcctcttatccagacaaatgtgacctttcctattgcgatgagtatggagcagggtacggcaagatgttaatactggggttcagaggactgttaaatacactg

SEQ ID NO: 956986 - DNA, 587 bp, Homo sapiens
ccataaaggtgaccaaaaaggtatttaattttcatagactgccaaataactaaatttattcactttataaagtaaacacaaatcaacaatgtattggggcttcaaagagtgagacttgagaacctmgaaccaacccaatcctgggggtgctatgtggctacctactcctcttccctacccttgggacagacaatcaagtattcttagcagcccacttgacttacatgtacataaagatcatctaaatcaataagattaaattgtagaagtactgctgcaactctgtataaagatgatggtgtctcgccatttggttcctagaaatataaaaaaaaaagtttccatttagtgcagaaaggacaattaaagcaatatccttcacctaccaataactaagaacaattagatcaaatactctaggccaagaaaatgcttcactgctcttccttatcttaccaaatatctgaattcagtacaaggattattatgccaacatcccttttcacattggaacatcttctgaagaacacaaggaaagcaatttcaaaaacggacacaatttacaatgcaggttaacatttaaataa

SEQ ID NO: 956987 - DNA, 613 bp, Homo sapiens
cctgtattccctgcccaaaagtttcataattgaaaacaacttcaacaaagctttagaatttgaaatcaatgtacaaaaatcrctatcgttttaatataccaccaacagccaagccaagaaccaaatcaggaagcccattcacaatttccataaaaaataaaatacctaggcatacagctaaccagagaagtgaaagatctctacaaggataactacaaaagactgctcaaagaaatcaggatgacacaaacaaatgaaaaagcattccatgcttatatttaggaataattaatatgttaaaaatggctatttggcccaaattcattaaagattcaatgctcttcctatcaaactaccaatgacattcttcacagaactagaaaaaactattttaaaatttatatggaaccataaaaaagcctgaatagccaaggcaatcctaagcaaaaagcacaaagctggagcatgatgctacccaacttcaaactatactatagggctgcaataatcaaaactgcatggtactggtacacaaacaaaaacatagaccaatgtaacagaatagatagcttagaagtaacactgcacacctttaaccatctcatctttggca

SEQ ID NO: 956988 - DNA, 724 bp, Homo sapiens
agactcttctttggtaggaattgctgtgaccactgatgaggatgaggctgtgattctaaggccaatagagttttgttcttagggggattatggctgcctctgctgtcatacaggtcaccagagaaataggggaaagctggatgttacaggcctcacccaactcccattcagtcaacctagccagtctcactctcaccatgccccaccaacaggtctgagtttttatccaggcagccagtgagcagaactgagatcttgccccaggctacaagcctcagtgctgagaaagcatgcatggctgtcaggcccctctgctccccacctgccatgacctctatgctcatatctgtacttctcattcatgcccaccctacccctggattttacccaggatatttaatgcttggtcaaaagttattacaaagttcagcttgaggttttcttctccatgtgtttcgtccccaattttactgacagccctccccatggagacttggtgataaacttagaaatgccatccctgagcttccctgggaactgtgagtgcctacagggcttttcctgcttcttcttctacttttatatttcacctggctctctaaatttgttccagttctaggtaaggtaaaatcctttcttaatctggattttcacgttctccagtgagaatttgtrtttggaggcagacgttccccctctcacactttggacagtcacagttttt

SEQ ID NO: 956989 - DNA, 850 bp, Homo sapiens
caacacggcaaaatccatctctactaaaaataaaataaaaaaaaacatttagctaggtgtggtggtgcagaactgtagtcccagatacttgggaggctgaggcacaagaatcgctcgaacccgggaggcagaggtggcagtgagccgagactgtgccactgcactccagcatgggtgacagagtgagactctgtctggaaaaaaaaaaaaaaaagagagacagagaaaacccggcttcacaaagacaggatgctggacatggaagcaggcttttcagtgctcacgtggcaatctcaggatattccactttgacttttatccagaacatatggagatttgaagttgtctcaaacacacttttagggccactgtcatttgcagtctcaagcagttgatcctcttctagcacagacaaaggtgattcgcgtggcttatccacaaatgggtcacagatccattccttcccagtttggggttctttggtggttgggaagtaacgctcaagctcttttgaaagctgaggtaggggccgggcgcggtggctcacgcctgtaatcccagcactttgggaggtggaggcagcagatcacctgaggtcaggagttcagtaccagcctgaccaacatggagaaaccccgtctctactaaaaatacaaaattagttgggtgtagtggcgcatgcctgtaatcccagatacttgggaggctgaggcaggagaactgcttgaacctgggaggcggaggttgcggtgagccaagatcgtgccattgcacttcagcctgggyaacaagagcgaaactccatctcaaaaaaaagaaaaaaaaaaaaaaagaaaaaagagagctgagg

SEQ ID NO: 956990 - DNA, 850 bp, Homo sapiens
caacacggcaaaatccatctctactaaaaataaaataaaaaaaaacatttagctaggtgtggtggtgcagaactgtagtcccagatacttgggaggctgaggcacaagaatcgctcgaacccgggaggcagaggtggcagtgagccgagactgtgccactgcactccagcatgggtgacagagtgagactctgtctggaaaaaaaaaaaaaaaagagagacagagaaaacccggcttcacaaagacaggatgctggacatggaagcaggcttttcagtgctcacgtggcaatctcaggatattccactttgacttttatccagaacatatggagatttgaagttgtctcaaacacacttttagggccactgtcatttgcagtctcaagcagttgatcctcttctagcacagacaaaggtgattcgcgtggcttatccacaaatgggtcacagatccattccttcccagtttggggttctttggtggttgggaagtaacgctcaagctcttttgaaagctgaggtaggggccgggcgcggtggctcacgcctgtaatcccagcactttgggaggtggaggcagcagatcacctgaggtcaggagttcagtaccagcctgaccaacatggagaaaccccgtctctactaaaaatacaaaattagttgggtgtagtggcgcatgcctgtaatcccagatacttgggaggctgaggcaggagaactgcttgaacctgggaggcggaggttgcggtgagccaagatcgtgccattgcacttcagcctgggtaacaagagcgaaactccatctcaaaaaaaaraaaaaaaaaaaaaaagaaaaaagagagctgagg

SEQ ID NO: 956991 - DNA, 579 bp, Homo sapiens
tgctttgtcctttttaattaaaaatcatgtattggccgggcacagtggctcatgcytgtaatcccaggactttgggaagccgaggcaggcggatcacttgaggtcaggagttcgagaccagcctggccaacatggtgaagccccgtctctactaaaaatacaaaaattagccgggtgtggtggcaggcacctgtaatcccagctactcaggaggctgaggcaggagaatcgcttgaacccgggaggtggaggttgcagtgagccaagatcgcaccactgcactccagcctgagcaacagagcaagactctgtctcaatcaatcaatcaatatcatgaggaaaaagtcttctttaaaatttgaaaattaatttttatttcagtagcttttgaggtaccagtatttttttgttatagggatgaattatgtagtggtgaattctgagatcttagtaaaccagttattccagtagtgtacattgtaagtaatgtatagtgttttatagtgtacattgtaactaatgtatagtgttttatagtgtacattgtaactaatgtatagtgttttatagtgtacattg

SEQ ID NO: 956992 - DNA, 708 bp, Homo sapiens
actcctggagtcaagtgatcctcccacatcagcatcctgagtagctagaactataggcacgtaccacaaggcccagataatttttyattttttattgtggagacaggggtcttgatatgttgcctaagctggtctcaaactcctggcctcaagtgatcctcctgccttctgtctaccaaagtgttgggattacaggcatgagccacagcaccagcctaagtctagctctgattctacattataataagctaataacgttgactataagcttatcttcccaggtccaggacaaagtcaagactcattctccaaccacccagagacatccataactgactcttcctttactccttttttctcttcatcattcaccttatcttatgtaaaatggagatttaccgggcactaaggaaagtctcacaagagtataagcatttgccttaccgcctacctgcccctcttcctacatgccttcctcctctttaagaaaatgtataaagactaaatttcctgaaaacctcctcggaaaagcagcctcagatgtgtctgtggcttatgtttttcccagacgtgccctgaagctgccttcataaacctcgatgattgagacttatgcttcagtcactcatttcagttgtcataggggaccagaatacgctatcccaaaatataccactttggcataaggattattttgagctgaaggca

SEQ ID NO: 956993 - DNA, 794 bp, Homo sapiens
ttgctgtcccttgctacaggatgcttctcaaatgccaagaattctaccatgcccctggccagctccaycagacaagatgggcagaaggcagcactgccccaaggtggcactgccagggacttccatccccctccaggtgagtagtcactgcatcttgttttattcaccttcacctccccagcccccagcctggcccagagtaagcactcagtgattagtcactgactgaatgaatagatggtgagcaggcaagggaagatacctgggttccccacaggccaggcagtccatactggtttacccactggggtggtctgtcttccttgtcaattttctatcacctttcgcctggggcctatgatttccccacaaaggattatcagtggtagagatgcaaagatggtctccctctctctcttcccaggatctgagctttcagtataaagaggcttcctcctgactgggtctcccttaactttggagggtcctgagttttggagggcttccctctccttggaggagagagcaggaggctgggtgtagaatcttttcagataaagaagtcctcttggattttcccattgacttttaagacctgggagggtccaacctatagatcatgaaggtccctgcaggaatgggaagatgtcaggggggaccttggtccctaccatgagaaatgaggacagtagagcactacactagccttggagcccagataactagcctggccccatctcttgcatgtactggctctgtagcttggaagaaaccacttcaccttattgagtctc

SEQ ID NO: 956994 - DNA, 476 bp, Homo sapiens
cttaaatgtaaaatccaaagctataaaaatcctggaagataacctaggcgataccatcctggacataagaacaggcaatgatttcatgacaaaaacaccaaaagcaatctaaacaaaagcaaaaatggacaaatggaatctaattaaacttaagagattctgcacagcaaaataaactctccacagagtaaacagaaaacatacagaatgggaaaaatatctgtaaactatgcatctgacaaaggtctaatatccagcatctataaggaacttaaacaaatttactggagaaaactaaacaaccccattaaaaagtaggcaaacaacatgaactgacacttttcaaaagaagtcatatatgtggccaayaactatattttaaaaagctcaatatcacggatcattagagaaatgcaaatcaaaaccacaataagatagcatctcacacctgtcacaatggctattattaaaaagtt

SEQ ID NO: 956995 - DNA, 639 bp, Homo sapiens
catagaaaaactatacaacagagcagaagtctaccaactgacaaatatgcctagtaccacctactggatcataccccaaagcttcaacaccaaaaatacctcattaatataccccytctgaaaccaaagacaaaaagtcagcttcaaataaacatcttgcacaaagcctcatacctgtgaaaacatccaaaaaaagcagtctattgactgtactcaatctacactgcagttgaaagaacactcacatgcagagatgagaaacaaccaacgcaagaactgcagtaactcaaatggccagagtgttgtgtgtcctccaaatgattgcaccagttctccaacaagagctgttaaccaagctaagcttactgaaatgacagaaattaaattcagaatatggataggaagaaagatcatcaagattcagtagaatggcaaaacctaatttaaggaaaccaagaatcccaataaaatgatacaggagctgaagaatgaaacagtcagtatattaaaaaaaaaaaaaaaacctgatggacatgacagagctgaataatacaatacaaaatctttacaatgctaccataaatattagtagcataatagaccaactagaggaactaatctcagaacttgaaaactggc

SEQ ID NO: 956996 - DNA, 794 bp, Homo sapiens
cagtccctcatagctagatgtgaccttgtgactaagttctggcctatgagaagtaagacgtatctcatggtgttttgagaaatctacttaaaaatgtaacatgacmggaaacagtggctcatgcctgcaatcccaacacttttggaggccaaggtgggataattactttgaggctaggagttcaagaccagcctgggcaacatggtaagaccctgcctctacaaaaaagaaaaatgaaaaaaaaaaaaaaaaaaaaacgaagaaaaaaaggtaatgtgatgcgacttatctccttcttcttggttggcattctaccagctattgtggactatatgaggaccataccttagggatggtagaacagtgaatgggaagaaacctgagtctctgaggatcactggagttaccacactagccacagactacctacctgcacatttcttacttttttttttcttttgagagggagtcaggctctgtcgcccaggctagagtgcagtggcatgatctcagctcactgcaacctccgccacaagagtttgagcaattgtcctgcctcaacctcccaagtagctgggattacaggcatgcaccaccacgcccagctaatttttgtatttttagtagaaatggggtttcaccatgttggtcaggctggtctcgaactcctgacctcaggtgatccacctgacttggcctcccaaaatgctgggattacaggtgtgagccaccgcacccaacctgcacatttcttttattatgtttaagccttaagccaataaaattttgggttt

SEQ ID NO: 956997 - DNA, 794 bp, Homo sapiens
cagtccctcatagctagatgtgaccttgtgactaagttctggcctatgagaagtaagacgtatctcatggtgttttgagaaatctacttaaaaatgtaacatgacaggraacagtggctcatgcctgcaatcccaacacttttggaggccaaggtgggataattactttgaggctaggagttcaagaccagcctgggcaacatggtaagaccctgcctctacaaaaaagaaaaatgaaaaaaaaaaaaaaaaaaaaacgaagaaaaaaaggtaatgtgatgcgacttatctccttcttcttggttggcattctaccagctattgtggactatatgaggaccataccttagggatggtagaacagtgaatgggaagaaacctgagtctctgaggatcactggagttaccacactagccacagactacctacctgcacatttcttacttttttttttcttttgagagggagtcaggctctgtcgcccaggctagagtgcagtggcatgatctcagctcactgcaacctccgccacaagagtttgagcaattgtcctgcctcaacctcccaagtagctgggattacaggcatgcaccaccacgcccagctaatttttgtatttttagtagaaatggggtttcaccatgttggtcaggctggtctcgaactcctgacctcaggtgatccacctgacttggcctcccaaaatgctgggattacaggtgtgagccaccgcacccaacctgcacatttcttttattatgtttaagccttaagccaataaaattttgggttt

SEQ ID NO: 956998 - DNA, 551 bp, Homo sapiens
atccaggaaaacatgacctcacaggatgaactaaataaggcatcagggaccaatcccagagagacagagatatgtgacctttcatacagataatccaaaatactgttttgaggaaactcaacaaaatccaagatagcaagatggcacagagatggaattcagaatactattagataaatttaacaaagagattgaaataaaaagaatcaagcaaaattctggtgctgaaaaatgcaattgacatactgaagaagcatcaagatctcttaaaagcaaaattcataaaggagaagaaagaattagtaaactttaagaaagcctatttgaaaatatatagtcagaggagacaaaagaaaaaaataaaaatgaataaagcacatgtacaagagctagaaaaaagggcaaatctaagagttattagccttaaagtggagatagagaaagaaataggaaaattttattcaaagacataacaacagagkaattttcaaacctagagaaagatatcaatattcaagtacaagaagattatagaacaccaagcagattta

SEQ ID NO: 956999 - DNA, 761 bp, Homo sapiens
acacacaaatgttcacagaagctttatttatggtagccaaaagctgaaaacaacccaaatgttctttaatggttaaatgcataaacaatggtacatccatacaatggaatacaactctgcacatcctcgtcagctcttggtattgtcagtatttttaatttaaccattctaataagtgtgtagtggtatctcattttgttgtagtttttattgccctaataatggctaatgatgttggacgttttttcatatgtttaatttgccatgcttgagtcttttttttttttttttttcttgagatggagtcttgctctgttgcccaggctggagtgcaatgatgtgatcttggctcactacaacctctgcctcccgggttgaagtgattttcctgcctcagcctcccgagtagctgggattacaggcacgcaccaccacacccagcaaagttttgtatttttagtagagacaagatttcaccatgttggcccggctggtctcgaactcctgacctcaagtgatccacccacctcgagctcccaaagtgttgggattacaggggtgagccactgtgcccggcctgagtctttggtgacgtatctgttccagtcttttccttattttgaaattgggttgttttctttctgtcttaatttttatttttttaaaagagaaggggcctctgctrtgttgtccagactgacctcaaattccttgggctcaagccatcctcctgctttggcctcctgaggagctgagcctac

SEQ ID NO: 957000 - DNA, 574 bp, Homo sapiens
aaacaaacagtcatagcttacataatttcaataaggccagacacggtggctgtagtcccagctattcgggaggctgaggcaagaggatcacttgagcctaggctttcaagacacaatttcaataaatatgtattgaacatccactttgtgctgggaacgagactcggtgctaggatatcgaagtcaattagatggggctcctgccctcgaggaactcacagactcataagcagatgagtacaatgcagtgtgatgagaactgttaaaaaagagagagagaatgcattggaaacagacagcaggtgcacctaatctaagcaggtgccgaggggtagctaagacagggaaggcttccgggagactgtgatacttgctgagtctcgaaggctaagtgtgccccatgagaaaggaagcagcagtgagggaagcacatcccaggtcagggattcgtgtgtgcagagacagaggggaggccagcrttgcaacattgtcagaggctgagagatgagggcgcctggcaggagaggtgggtaggggccgtctggcagggtctcacgtgccctggagtggagca

SEQ ID NO: 957001 - DNA, 692 bp, Homo sapiens
tccatcctgcgccctcctcctttccatcctccctgctgagacttgcctgcacgtgaggcccgcccgcgtcagtgcccctttgtgagattcgcccatgccagtgctcccgcatgagaaggtacgcgcrcatcacccctgcattctcacgggacatagggtgtgatggttcattttatgtgtcaacttgaccaggccatagggtgcccagatatttgttcaggtattattttgggctcatgagggtgtctctagatgagattaacatttgaattgaatttgaattggtagaccccataaagcagagggccctccccaacgggggcgggccccatccaatacattgaaggcctgaacatcactaaaggcagaccatccctccagcaaaccagaatcgaggtcaggattccatccggtggtttccagagggtaccttgctcttagaagatgctgagcagggaggggggaggaatagcatcgggagatatacctaatgctagatgacgagttagtgggtgcagcgcagcagcatggcacatgtatacatatgtaactaaccagcacaatgtgcacatgtaccctaaaacttaaagtataataaaaaaaaataaaaaaaacaagaccatttcataatattgtttaaaacaaaacaaaacaaacaaaaaaaagaagatgctgagcaaatggcagccgcc

SEQ ID NO: 957002 - DNA, 608 bp, Homo sapiens
agaaaagtatgtaatgataatatcaaggtttcatgttaatgtggtttatgcaaagatttatgtcatcatccttccccttcaaccacaaccctattctaataaccacatcctgtgaccaaatagctcttcttttcctacaagcatcacacttattattagttactctgaggttctcaatgtgaattttagatagtgacatatcctttggccaacacttgaacaatcttcacacaagatgtgaagaacatgacaacaaactgtaactaagggtatcgaagaacatagttaaggactcctggctgtgatggccgttttcagtaagacattattctacaggacactttctggagtatgaattcaacatattagaaactacattgtggaggtttcccctgaagaaaaaaaagtagttgggaaacccgtgacaataaggatctgaaattaatgtggtatgaaagtgagggtaggtgcacagctctgggccagccacacagagttagggccactgtctcaacatctgaaagagactgggcttgaacagtgatgamtacattaaccaggggcctggatctgcattgctcacacttgagcagagattggaatccagc

SEQ ID NO: 957003 - DNA, 608 bp, Homo sapiens
agaaaagtatgtaatgataatatcaaggtttcatgttaatgtggtttatgcaaagatttatgtcatcatccttccccttcaaccacaaccctattctaataaccacatcctgtgaccaaatagctcttcttttcctacaagcatcacacttattattagttactctgaggttctcaatgtgaattttagatagtgacatatcctttggccaacacttgaacaatcttcacacaagatgtgaagaacatgacaacaaactgtaactaagggtatcgaagaacatagttaaggactcctggctgtgatggccgttttcagtaagacattattctacaggacactttctggagtatgaattcaacatattagaaactacattgtggaggtttcccctgaagaaaaaaaagtagttgggaaacccgtgacaataaggatctgaaattaatgtggtatgaaagtgagggtaggtgcacagctctgggccagccacacagagttagggccactgtctcaacatctgaaagagactgggcttgaacagtgatgactacattaaccaggggcctggatctrcattgctcacacttgagcagagattggaatccagc

SEQ ID NO: 957004 - DNA, 669 bp, Homo sapiens
gcaacagtggaaaaatgttcccttgtcttctcttctaatacccttcagtctgggagtggagaggccctgcggctcagaaaaggctgaagatgagagctggggggacatgttctgtcagcccctgctcatcccggwcacaccccaagctgtaccttctccccagatacctctcctttctttctttccttttttttttgagacggagtctccctctgtcgcccaggctggagtgggctccctctgtcacccaggctggagtgcagtggcgcgatctctgctcattgcaagctccgcctcctgggttcacgccattctcctgcctcagcctccccagtagctgggactacaggcggccgccaccacgccctgctaatgttttgtatttttagtagagacagggtttcaccgtgttagccaggatggtctcgatctcctgacctcgtgatccgcccacctcggcctcccaaagtgctgggattacaggcgtaaaccaccgcgcccggcctttttgagacggagtctagctctgtcgcccaggctggagtgcagtggcgcgatctcagcacactgcaagctccgcctcctgggttcacaccattctcctgcctcagcctccagagtagctgggactacaggcgcccgccaccacgcccggttaactttttttcc

SEQ ID NO: 957005 - DNA, 616 bp, Homo sapiens
gtgtgctgcacccactgacctgcgcccactgtctggcactccctagtgagatgaacctggtacctcagatggaaatgcagaaatcacctgtcttctgcgtcrctcacactgggagctgtagaccggagctgttcctattcggccatcttggctccttcccccaccaagttgcttcttatggatgagcaaataaagtgatttctttgagaaggaatctactcctggttaacattgttgaaatgacagtaaataattgagaatcttccataaaccttacttgataaagcagtgcagggtttgagaggattgactctaattttgaaagaatttctattgtgggtaaaatgctaaaaaatcaaacagcattgcatactgcagagaaatcttttgtgaaagtaagagtcaattgatgtggcaactttatttttattttattttaagaaattgccacagccaccccaaccttctgcaaccactaacctgttaagtcagtagccatcaacatcaaggcacaacctgccaccagctaaaatattgctacttacttaaggctcagatgattgttagtatttttcagcaataagggattactttttttttttttttttgtagagac

SEQ ID NO: 957006 - DNA, 507 bp, Homo sapiens
tggtcccagctactcgagaggctgaggcaggagaatggcatgaatccgggaggtggagcttgcagtgagctaagatcgygcaactgcactccagcctgggcagcagagcgagactccctctcaaaaaaaaaaaaacttactgaaaagcaagaagtcaggtggaggttacctttggggaggattggggtgctgtccgctttctaataattcgttaaactatagtctacatcttgtgctatatttcacaatggaaaaacagaaaagagctcctgcccataacgctgctttgcaggtttggaaatttcagattcaattcctctccttgcgggggccaaggatgggaagagcaggtggttccagtagggaaagaggaggccctggggcctcaaaatggctaaggaccattcctcagcgtgggtggcacctaccctggaaacaggactctacttcctcctctgttagggggcagagcagccctgcagtgccttctgggcacaggtcctcact

SEQ ID NO: 957007 - DNA, 579 bp, Homo sapiens
tctctgcactcccaacaacaytggatattctttatttgtaatttttttaaaactacagacacacctgacttaagatggtttgacttaggaatttttgacttttcaatggtgtaaaagcaatatccattctgtataaaccatactttaaattttgatcttattccagaccagcgatactcagtaagatactctttcacaatgccaggcagcctcagccacatgatcatgaaggtgaacaacttatactctacactttcaactcacaatattttcaatttacactggatttattgggagttaaccccatcataagttgaagagcatctgtattacatttaaaaacccaggttattttaaaatagttgcttatatttacatacttacaagattattcagtctagcccagatttacaagggggaaaaaacacactcaaggtattttaagcccagagagatgtaatacagtgaagtgcattgcaaaagttttgtaaggacagaaaaagcaaaattgtgcttccaaaggtcaggaactgcaggaagctactattggccctgcagcactaaacaaacccacactcc

SEQ ID NO: 957008 - DNA, 579 bp, Homo sapiens
tctctgcactcccaacaacactggatattctttatttgtaatttttttwaaactacagacacacctgacttaagatggtttgacttaggaatttttgacttttcaatggtgtaaaagcaatatccattctgtataaaccatactttaaattttgatcttattccagaccagcgatactcagtaagatactctttcacaatgccaggcagcctcagccacatgatcatgaaggtgaacaacttatactctacactttcaactcacaatattttcaatttacactggatttattgggagttaaccccatcataagttgaagagcatctgtattacatttaaaaacccaggttattttaaaatagttgcttatatttacatacttacaagattattcagtctagcccagatttacaagggggaaaaaacacactcaaggtattttaagcccagagagatgtaatacagtgaagtgcattgcaaaagttttgtaaggacagaaaaagcaaaattgtgcttccaaaggtcaggaactgcaggaagctactattggccctgcagcactaaacaaacccacactcc

SEQ ID NO: 957009 - DNA, 579 bp, Homo sapiens
tctctgcactcccaacaacactggatattctttatttgtaatttttttaaaactacagacacacctgacttaagatggtttgacttaggawtttttgacttttcaatggtgtaaaagcaatatccattctgtataaaccatactttaaattttgatcttattccagaccagcgatactcagtaagatactctttcacaatgccaggcagcctcagccacatgatcatgaaggtgaacaacttatactctacactttcaactcacaatattttcaatttacactggatttattgggagttaaccccatcataagttgaagagcatctgtattacatttaaaaacccaggttattttaaaatagttgcttatatttacatacttacaagattattcagtctagcccagatttacaagggggaaaaaacacactcaaggtattttaagcccagagagatgtaatacagtgaagtgcattgcaaaagttttgtaaggacagaaaaagcaaaattgtgcttccaaaggtcaggaactgcaggaagctactattggccctgcagcactaaacaaacccacactcc

SEQ ID NO: 957010 - DNA, 474 bp, Homo sapiens
cctggggagggtaacccctctcctcagcaactcatccctcatgyccctggcctctctctctgctctctccatcctctgttcaactctgcctgagcccagggcttttacaggcctcagaggggagaaagtgggcaccatggttggccatggggcaggcccagaaaatgcacaagttcccactcgtgtcagcaggactggcagcccagcccacagccttcagaccctccctggccagaaggaggggcttcactggggacttgcccccttctgcccaggagactgtctgcctcccagcgccatccatggcacctaggctgctcatggcaaggggcctgtaggccagcaccagttgccctcagcccatcttccctcagcttccccgtggctgaggtggcaggaggctggtgtgtcaactttgccctgagcatgcacacgcccagctaggctgtaacagcactggggcttggccccaac

SEQ ID NO: 957011 - DNA, 653 bp, Homo sapiens
tagactgctggcctaccctgtggatttcagacttaaaactgcaacatcgactcttttcagtttccagactgcccggcaaatttcagactttccaccccccacarttgcatgagccaattccttaaaacaaatctctgtatctctatatattctctacataatttctatatagccctgtgattctgtttctctggagaaccctgactaatacagagggctccagggaggatgaccctggagaaaaaaatggagctgataatgaattgtgagtttgaccataacctgagaacattttttcagttttgacaaagaggttgcagagaagtcagtgatagctatttaaaaatgaaattatgtaggagaaaaaactgaagctattgttaactccagggaaaacaaaaagtggtacatgaagataatctgacacaattgtaaacactgactattgatttaaaagggatggcagtggtagaagaagttgtggtataagtgagttaaatcctcatcttaattgaggaaattaaaaagattaaaaaataaaaacttaagaaatagcaatgttatttcaaaacaaggagataaatggcagaagaacaactaaaagcttgtaaagcatctgcttctgctgagtgaatctggtgggagtgggtggg

SEQ ID NO: 957012 - DNA, 645 bp, Homo sapiens
aggagggctttgctgagtgaacaaggcttgaggggcaggggtatggcaaaactctccaaacaaagaaagtctagaaaaacgacttaaggaaaatacaccaaaatattggccgcacatctgtgggtgtaaaattttagggagaatgtggggggggggtgttactttccattttacacatatttgtattttcagattttcaacaataacagtattcaatacataatcagaaaaaagagatgtggaggaggaggagagaaacttcccaaggagctcccttgggtgctgctggctcctaattagtgtaacctgttaatcacatgttgctcggtgttagagcggtccctctgtgctctgcttggcagggcgctgttggcctggtctccctcgctatttctatttgcaagcatgggctttcttcccagcagaatctggttcctgggaagagtaatgttccaaaggcctctgatatgcctcgatgccctcctgtcttccagagccccaacctcactccctttccccaccatacaaaacacacckcccaggggtcacatttgggggtcccgccccctgctccaatgccatggtgtccccaagcacagggctttggcctgagttgtcagtctctggatgcatttgaggggcagc

SEQ ID NO: 957013 - DNA, 645 bp, Homo sapiens
aggagggctttgctgagtgaacaaggcttgaggggcaggggtatggcaaaactctccaaacaaagaaagtctagaaaaacgacttaaggaaaatacaccaaaatattggccgcacatctgtgggtgtaaaattttagggagaatgtggggggggggtgttactttccattttacacatatttgtattttcagattttcaacaataacagtattcaatacataatcagaaaaaagagatgtggaggaggaggagagaaacttcccaaggagctcccttgggtgctgctggctcctaattagtgtaacctgttaatcacatgttgctcggtgttagagcggtccctctgtgctctgcttggcagggcgctgttggcctggtctccctcgctatttctatttgcaagcatgggctttcttcccagcagaatctggttcctgggaagagtaatgttccaaaggcctctgatatgcctcgatgccctcctgtcttccagagccccaacctcactccctttccccaccatacaaaacacacctcccaggggtcacattkgggggtcccgccccctgctccaatgccatggtgtccccaagcacagggctttggcctgagttgtcagtctctggatgcatttgaggggcagc

SEQ ID NO: 957014 - DNA, 645 bp, Homo sapiens
aggagggctttgctgagtgaacaaggcttgaggggcaggggtatggcaaaactctccaaacaaagaaagtctagaaaaacgacttaaggaaaatacaccaaaatattggccgcacatctgtgggtgtaaaattttagggagaatgtggggggggggtgttactttccattttacacatatttgtattttcagattttcaacaataacagtattcaatacataatcagaaaaaagagatgtggaggaggaggagagaaacttcccaaggagctcccttgggtgctgctggctcctaattagtgtaacctgttaatcacatgttgctcggtgttagagcggtccctctgtgctctgcttggcagggcgctgttggcctggtctccctcgctatttctatttgcaagcatgggctttcttcccagcagaatctggttcctgggaagagtaatgttccaaaggcctctgatatgcctcgatgccctcctgtcttccagagccccaacctcactccctttccccaccatacaaaacacacctcccaggggtcacatttgggggtcccgccccctgctccaatgccatggtktccccaagcacagggctttggcctgagttgtcagtctctggatgcatttgaggggcagc

SEQ ID NO: 957015 - DNA, 624 bp, Homo sapiens
cctgtcttacttcctgggggctcacctcaaccatgacctcctctgagaggccctctctgaccacctcatcgaaaacatcaccctccttctccctcatgtgtctttagaactcttgctaccacctgaaatgatgttactagcctatttgttgatgtgtttgctgggtctctcccatattatctgtgtgtgtgttgtaagccctgtgcagggacagggtctgtgctttgttcatggctgcatcctcaatgcctagcacagagcgtggcacgtggcctttgattgtaaatctcactgaagcaaacaattgaaggaagccacagaggagaactggaccctgtcaagcagcaacgtcagtgctatttttcagagaagaaagaaaaacttcgtgctttactaaaagaaccaaatttacttcagtttaaggcaaattccacacagagactgtctcagagacgggcacagaaccagacaccgtagaaacaccaccaccatgcatgacggggaagcagaggcaggcggaagacgggggcctggcctgcaccaggcacggagaggtcagtgggctgaggagctccatgcggcaacagggattggcatgcrtgatctgctccccgagtgggcaaa

SEQ ID NO: 957016 - DNA, 615 bp, Homo sapiens
agtttatgggaaaaataaagcaaacgcatgtgatgacttcttacccgatgtggaaatagagtcgtgactgtgagcgctggtatgctgaatctagaaccaactgtcaaacttgcctttcartgggagttgaagaggaggggttttgtgggattgtggggtaagcattggaggattccctaagatccatgaaagcagagatgaatctcagcctcttctttcaccgctagcacccagtacggtgcctggcacatagcaggctccgggtaactactagttcctgagtcagcgcatgaatgctgtggttgaggtttgaaaaaattgaaaggaggataatattcatgttattttaaacagaaattgtatatatgactattgtggagcgttaggaaacactgtgcaggtatttaagaaaataactaggccgggcagggcggctgactcctgtaatcccagtactttgggaggctgaggtggacagatcacttgagtccaggagttccagaccagcctgggcaacatggcgaaacccccgactctacaaaaaatacaaaaatttgccgggcgtggtggcacatgcctgtaatcccagctactagggaagctgaggtgggagga

SEQ ID NO: 957017 - DNA, 766 bp, Homo sapiens
cattcttctaaaaacatatatagtgatcaactcttttttttttttttttttctttttgagacagagtcttgctctgtcgcccaggctggagtgcagtggtgygatctcggctcactgcaaactccgcctcctgggttcaagcaattctcctgcctcagcctcctgagtagctgggattacaggcgcccgccaccacacccagctaatttttttgtatttttagtagagacagggtttcaccatgttggtcaggctggtctcgaacccctgacctcttgatccacccgccttggcctcccaaagtgctgggattataagcatgagccaccgtgcccggcactctttttttttttcttttttttgagatggagtttcgctcttgtctcccaggctggagtgtagtggtgcgatctcagctcactgcaacctccacctcccgggttcaagcagttctcctgcctcagcctcctgagtagctgggattacaggtgcgtgccaccacacccggctaatttttttcttttttgtatttttagtagagatgggtgttttaccatgttggtcaggctggtcttgaactcctgacctcgtgatccgcctgcctacagcctcccaaagtgctgggattacaggcgtgagccaccgcgcccagccctgattaacttattttaatctataactaaggtctaagtcctgaagaccttcctctggagcctcagtaaatttacttaatctaaatgggtccaagtgcgaggtgattaccctt

SEQ ID NO: 957018 - DNA, 923 bp, Homo sapiens
atgctggtcctccagaatatttcttcttcttttttttttttttgagacggcgtctcactctgtcacccaggctggagtgcaatggcatgatctcggctcactgcaatttccacctcccgggttcaagcgattctcctgcctcagcctcccaagtagctgggactacaggcgcccgccaccacgcccagctaatttttatatttttaatagagagggggtttcaccttgttggccaggattgtctcgatctcttgacatcatgatccgcctgcctcggcctcccaaagtgctgggatttcaggcgtgagccactgcgcccggccactccagaatatttctaagcatgcttcctcacttccttcaggacttttctcagagaggccttccttgatgatcaatcctctataaaatggtaacctccacctctcttggtattcctgggccctctcaccctgctttaagttttttacagcaattgccaatatcataagttatctttatgtggagtatatattttttcttttttttgagacgtagtctcgctctgtcacccaggctggagtgcagtggcgtggtctcggctcactgcaagctccgcctcccgggttcacgccattctcctgcctcagcctcccgagtagctgggactacaggcacccgccaccacgcccggttaattttttgtattttttaatagagatggggtttcaccatgttagccaggatggtctcgatctcctgacctcgtgatctgccagcctcggcctcccaaagtgctggtattacaggtgtgagccactgcrcccggccatattttttcttttttctgagacagggtctttctgtgtcgcccaggctggagtgcagtggcccaatctcagctcacttcaatctctgcctcctggattcaggcgattctcctg

SEQ ID NO: 957019 - DNA, 445 bp, Homo sapiens
gtcctgagggctctcacattccatccgttctccacccagaagtcagagccacctycccaaagagcaaatcagatatattattcttccgctaaaataaaccctgcagtgtcagttttttaaaaatgcaggaaaaaggcatatcacataatttaattttttttttttttgagacggagtctccctctgttgccaggctggagtgcagtggcatgatctcggctcactgcaacctctgcctccagggttcaagcaattctcctgcctcagtctcctgagtagctgggactacaggcgtgcgccaacacgcttggctaatttttgtatttttagtaaagacgggatttcaccatattgcccaggctggtcttgaactcctgagttcaggcaatccgcccacctcggcctctcaaagtactcggattacaggcgtgagccaccacgcccg

SEQ ID NO: 957020 - DNA, 605 bp, Homo sapiens
gaaaaagcaaggggactttgtcttgtaccttaggtaccaacttgtctacaggggaatagagcaccaagtggkctctttggttcttcaattctagaacttggctcttggatagtatttctggacctgtcctgggccacaggggagcccattgtcctgaagggtgggtccaaggcagggcagcattcactacaagctgactgaagagactttgagtcttcagggaatgtcagtggtagactcatgggcctgtggtggaagtggtcatggggtgaggttcctctgcatttggaaaggggagggaagactggaaagaactgcatcttgtggtttgagtgccagttcagccacagtgcaatagaacatcaggtaacaacatcaggtaaccttctaagtttgttgactctaatccctgaaatctgaatggcacctcaggacatgcccagggtaagagaaaacctgtcatactaaacagaaagacacaggcctggttgattttgccacctgctgattggagagcctcagggctttgagctaacataagcagtagccagaaagtgtttcagcaggccacgggtgagaccctgtgatgtgtaggtttcaggtca

SEQ ID NO: 957021 - DNA, 590 bp, Homo sapiens
tgttggcattgtatgtatttctccatccctttaacctatctgtgtctttatatttagagtgagtttcttgtagacaacatatatttgggtctttttgttcactcttgtcagttctgtcttttaattggtatatttagatgattcacattgaaagtattgttaaagttgggttttagtgtctaccatatttgtttcttactcattatacttgttccttgttgcttattttaaaatgtactttttttttttttttgagacaaggtctccctctgtcacccaggctggagtgcagtggcgggatctcagctcactgcagccttgacttcctggactcaagtgattctcccacttcaggttcccaagtggctagaactacaagggcacaccaccacacctggctaattttttgtattctttatagagatgggattttgccatgtaggccaggctggtctkgaactcctgggctcaagtgatcctcctgcctcggccttctgaagggattacaggcatgagctacgtgcctagcccattgtctgattttaattgagcattgtatattattccatttttcttttctgtataaaata

SEQ ID NO: 957022 - DNA, 547 bp, Homo sapiens
gctggtgcctcctttcagccgcctctgtctggggttcccttcgtctggccccgcccctcgggctaagcggggcggggccaggcggkcccggaggctgcggcaggccggacagcgggagcaggtggaggactggcggcggtcgagatcgtgctgccatggctcagcctctgggtccagagcctcagctcctacctcttccctccttgccagcccctgatgcctgccagacttttgcctctgctggagcccctgcctgaccagcttcccctccctgtctggttgggatttgggggctgagctgtctggggtcccagggccaaccaatgcagtgccggctcccgcggggcctggctggagccctcctcaccctcctgtgcatggggctcctgtgtctgcggtaccacttgaacctgtccccgcagcgggtacaagggacccccgagctgagccagccgaacccggggccccctaagctacagctacacgatgtcttcattgcagtgaagacgacccgggctttccaccgcttgcgcctggagctgctgct

SEQ ID NO: 957023 - DNA, 617 bp, Homo sapiens
agctgggcccaggggaccactaccaccaagacgcagagaccggtagtggccccaaatgccaggctgtgctgatatttattggatacaagacaaaggggcagggtaaggagtgtgagccatctccaatgatagataagttcacgtgggtcacatgtccatgggacagggggcccttccccgcctggcacccaaggcagagagagaggagagagagacagcttacaccattatttctgcatatcagagacttttagtactttcactaatttgctactgctatctagagggcagagccaggtgtacagagtggaacatgaaagtgaaacaggagtgtgaccgctgaagcacagcatcacagggagacggttaggcctccggataactgtgggcaatcagtcaggccctccacaagaggtgtggagcagagtcttctctaaactaccccggggaaagggagactccctttcccggtctgctaagtagcaggtgtttctccttggcactgatgctaccgctagaccacggtccgcttggyaacgggcgtcttcccagacgctggcattaccgctagaccaaggagccctctggtggccctgtctgggcataacagaaggctc

SEQ ID NO: 957024 - DNA, 592 bp, Homo sapiens
tagccaaaataatcttgataaagaagaatgtaacttggaccactcaaacttcttggtttcaaaacatactacaaagctacagtaattgagacagtgtgatactgatataaagacaggcatataaatcagtggaacagaatttaaagtctaaaaaaattatacattgcagtcaattcattttcaacaatggggccaagatcattcattagggacagaatagccttttcaacaaatggtgctggtactactggatatccacatacacaagaatgaaagtattcctcttccaaataccatacacaaatactaagtcaaaatggatccaatacccaaatttaacaatgacaaccataaaattcttatgagaaaaaataagagtaaatcttcataaccttgcattagacagtggtttcttagatatgacaccaaaagcacaagcaaccaaagaaaaccagacaaatttgacttcatcaaaattaaacactttcacrctttaaagagcaccatcaagaaagtgaaaagattctctaggaagcagactcaaagaagaaaacaaagaaagtgaaaagataacccacaagatgggtaaaaa

SEQ ID NO: 957025 - DNA, 788 bp, Homo sapiens
cctatggaggacactaaatgaacgcatgggggaaaaacgggttttattgcagagggagaccctttgtttcatacagatcgtttgtaaacttagatattttattagcaacaaattatgatagagcttacaaactccttgagaatcgctgcggtagtaggtgggggtggagcttctctaggcagcatttcagtgtgtcctagcttggatgctgtggcttcccgagctctgaatctatactgcttactctgggcttatggagtgtgtagcagggaatccttgttgaaggatccccaaacccttgatagccatggacagcccacagtggtcatggagccggagccagaatgtaattcccagtgtgaccaggagctagagtttaagtcaaggcagcaggtatactcaggtgcattttccattccctttgagggaggggtggaggtttgagccccctccacatcccaccccattggggtgcctttgtcactcttgacagctttagagtgacttagatgggagattggtggggaggagggggggaggggcactgtttgaatctaccctgctggaggcactgaatagttttataagtatgtgtacactctattgttcaagtgtttgcttaaatcactgtatcttcttagaaatttttgtaaccttttggttagcactgttacagtttagttttgatgctcggtgtttcatttcccatctcctttcacctttgttttttaaaaaagcaaaagatgcacgtaraacagtggaaagcttaactatagaaaccccgagtt

SEQ ID NO: 957026 - DNA, 574 bp, Homo sapiens
gacctggcttcttatttctttgagaaaaggaagcaatcaaaagagaaattctatcacccccaccttttcatctaccaatcagcttgcytttatggccatatacagtaccttccctctcatggctaggcttttatctaaaaccagcccccttcatttgcttattggatcttatcccctctctcctacttaaggacaccagtccaccaaatatcctctctattctgtagcatatattttctctgttcttaaatcatttatgacttccacattttcaaatccagtggtcagctctcagtcctcagactgaggatctaataggactaacagatcttactgaatctattctcaactcttaacagaactgaatcctcccccgacactgaaacatggtcttcacttggtatcaatgaatcctctcttttggttcccctctcacttcaatagtccctcctactcattctcctttgctgggctctcgtcatcaatgagctctctttctcttttttcacttttttttcctttattttattttattttattattattatactttaagttttagggtacatgtgca

SEQ ID NO: 957027 - DNA, 704 bp, Homo sapiens
aggactgtgcgagaccaagctcctcccacccggccttgtcacctcttctccttgtgcccagggacctcccagctgctgtcaagtgggtggctaccaccatggcgctggccagcacaggccaggtacacagaaagcattaactacaagatgaggccgggtgcagtggctcacgcctctaatcccagcactttgggaggctgaggcaggtggatcacttgaggtcaggagttcaagaccagcctggccaacatggcgaaaccccatctctacccaaaagacaaaaaattggctgagtgtagtagcacatgcctgtaatcccagctacgtgggaggctgaggtaggagaatcgtttgaacctggcaggcaaaggttgcagtgagccaagatcaccccactgcactccaacctgggcgacagagtgagactctgtctcaaaacaaacaaacaaagaaaaaaaaaacaactacaagatgagagtctgtgttgggtctgcacagcagaccaggggcctgagccctctctgtggggtggagagtgccgggtccctgcatgctgcttcacgggtgacctgatggctgagagcagctagtgctgaggctgtgcagatctcagcgtccagtggggggctgcagaccccagcaccctgggtccgaatcctgctgctygtcctgaggtatgagagccacaagcacccgggcatggg

SEQ ID NO: 957028 - DNA, 629 bp, Homo sapiens
gcaccgtctgaggctcatcaggaagctcctctctcaccgaccgtggctctcagcactcagggagcgccactgagcatgcgtgagaacagccgccctcagctcgcgggggygtcagcttcctttgaaaaccccctcgggtctgtgtgcacaaggctctgaactaaccctagtgggtcaccacgcagggccccttctcagcgcctgctctccgctccacgtgagggaagcaagggcagcggagaacgcgtcccacgcagtcaagccagggatgggcctcgggcttcctttctctgtccacgatgcctctggaagcaggatacggccctcgaggcgggctcctgggattcctgggaacacgggagggtgagctatgagcaggccggggcagggcaatcatggagactggacttttgctcatatgggcagaagagtgatcaggaaattattctgaatgtgaaaagacatggccagcgtgtgaccggcagatgtgtatcctccagtgctctgggagaacgcagccccggctggtagcccgggcccgtttctgtgaggtcaacactcacaccacggccaatgtcaggcaaacaacccggtgtcaccgaagcagggttggtaagagaagcacagcc

SEQ ID NO: 957029 - DNA, 737 bp, Homo sapiens
atcatgagccataaggaccaggagccagcacagagcagaggagcaggagggcagagagagctggggcctcagaccacacctgacacctctgatgagctacacccagggtctcgtcctccttaggcgttgttggcctggctcggaatcttgtctggggcatccgctgagggttgaagctggatactgcccctcgagctgaactaggacacagcatgtcctccctgggcaagcctgcagtttggtcaattcccggaaagggactttagttcctggaggaggcccagacagggagccctccctcctgcctcagctctgagccaagctctccagatgcagaggacagagactctcagcaaagcagctccctgcaagtggctgtggggcctcctccttaggcagagagagagggagagaggggtgaagacaccgtgctcctcctgaggaatctttatttttattttcaatattttttttttttgctctgttacccaggctggaacgcagtggcaccaccataactcactgtagtgttgacgttctaggatcaatcgatcctcctgcctcatccttctgagtagtgggaactacaagtgcatcactatgtcagtcaatctttttattttcatttttgcagagatggggtygtgctatgctgcccaggcttgtcctgaactcctgggttcgagggatcctcctgcattagccttcgtgcattagcacgggaattacagccctga

SEQ ID NO: 957030 - DNA, 710 bp, Homo sapiens
gaccacgcaaatacctgtgtcatttaaaccccaataaaaggaaagtgtgatgatcccaattttacagatgagaaagcatgacaccaagaggaagagcaacttacccaaggaatggatggaaagagtttcaccatccagatctgtaagaccttcctaacacttaatctcccatggttacaggaacgaggctgtgtccacgatgagtcctggcatgtagccagaaccaggccaaagtggaatcaaggggatccttatagctttagggcagggagtatatatctcccagtgctgtgtccttaccatttagggtagggaagatttttagtccaattcaaaccttcccccattttacagatgggacaactgaggcccacaaggaaaaatcattttacagactcacatactgagtctgaagctaaacctcccacctgtcagtcctgtttcaggaggtgggtagtttggaatgcagctctggagttggccaactccttgagtatacatatcactcctctcagacttttcctattctgtaaacaggagattttaaccagggtaacaacactttaaaatgtcagctttttaaatctcagccaggcctggggtggtggctcacgcctgtgatcccagcactttgggaggcagaggcaggaggatcrcttgagcccaggagttagagaccagcctgggcaatatggggagacccagtctct

SEQ ID NO: 957031 - DNA, 656 bp, Homo sapiens
ctgatgtaccccagctccaggattgagtaacactgaatcagatacaagaaaacgatgctcttttcaacctttattgattaaatcaaggaggaaaaaagtctcagtttggtgcaaacatctttcacacttttctttgttttgttggttttttttcttctttttttttgaggtggagtctcactctgtcacccaggctggagtacagtggcgcaatcttggctcactgcaacctctgcctcccggttcaagcgattttcctgcctcagcctcccaagtagctgggattacaggcacccgccaccacagccggctaattttttatatttttgtagagacggggtttcaccatgttggccaggctggtctcgaactcctgacctcaagtgatctgcctgcctcggcctcccgaagtgctgggattacaggcgtgagccaccgcacccggtcctctttcacacttttcaacactggctaatctcccattttgtcgaagagtgaacaggttgcaggcagtggtatctgctggaaatttgatacttggccttctttaaattgtatttgatttatttatacgaytgcctgcttccttccttcctttctctctctctcctttccttccttctctctttctctttctcgctctctctctctttctt

SEQ ID NO: 957032 - DNA, 493 bp, Homo sapiens
aggcagaggagtcgcttgaacctgggaggtggaggttgcwgtgagccgaggttgtgccattgcactccagcctgggcaacggagcgagactccatctcaaaaaaataaaaataaaaataaaggccaggagttcaagactggccagggcaacagagcaagaccctatctctacaaaaaattcaaaaaatagcccgatgtggtagtgtgtacttgtagtcctccggaggctgagacgggagattccttgagcccaggagttcaaaggtacagtgagccacgattgtgccactgcactccagcctgggtgacagagcaagagcctgtcacaaaaaaaaaaaaaagtagttcagaaatcatactgtcattttcacaacatccaattggtacagaagccagccctattcagtatgggaggtgaccgtaccagggcatgaagccaggaggtggggctcattggccacactctcatcttggaggctgccgcccaccacgt

SEQ ID NO: 957033 - DNA, 607 bp, Homo sapiens
cagcacaccgatgggtcttgactctttatccaatttgccagccttttaactggggcatttagcctgtttacatttaaggttaatattgttatgtgtgaatttgatccgtcattatgatgctcgcttgttattttgcccattagttgatgcagaaaaacagcaaattttacctcaattaacaaatcttctggtgatgaggttcatttatacagtaattagtggacattaaaataaaggaagtggcttccttgctgggctcggaggtggtgtattaatctgttttcatgttactgataaagacatacccgagaccgggcaatttacaaaagaagaggtttaatcagactcacagttctacatggctggggaggcctcacaatcatggcagaaggcaagaaggagcaaataacatcttacatggatggcagcaggcaaagagagcttgtgtggagaaacgcctgttttaaaaaccatcagatctcatgagactcattcactattgcaacaacagcgcagtaaaggcctgcccccataattcaatcacctcccactgggttcctcccaygacatgtgggaattgtgggagttacaattcaagacgagattt

SEQ ID NO: 957034 - DNA, 635 bp, Homo sapiens
cccccaaaggctgccagttttgggtggggtccagaacagaagaaggctctgcaacaggtccaggctgctgtgcaagttgtctgccacttggcacatatgacctagcagatccaatggtgcttgaggtttcagtgtcagatagggatgctgtttggagcccttggcaggctcccataggggaatcacagcaaaggcctctaagattttggagcaagaacctgtcatcttctgcagataactactctccttttaagagacagctcttgacctgttactgggctttggtggaaactgaatgtttgactatgggtcatcaagtcactatgcaacctgtactgcctatcatgaactgggtgctttctgacccatctagccataaagtgggtcatgcacagcaccattccatcatcaaatggaagttgtatatacatgattgggcacgcttgagcagtcctggaggcacaagtaaattacatgaggaagtagcttaaatgcccatggtcttttcaccccagccaccctgccttctctcccccagcctgcaccaatggcctcatgtggagttccctatgatcagttgaccgaggaagagaagagaakactagggcctggttcagacagctctgcacgatatg

SEQ ID NO: 957035 - DNA, 613 bp, Homo sapiens
tgctgcaatctcattttaaaacttgaatggctagggagttccttcctatggatgaccaaagacagtggtttcttgagatggagtctatccctggtgaagatgctgtgaacattgctgaaatgacaataaagtatttagaatattatataaacttagttgataaagcagtggtagagtttgagaggattgactccaatttttaaagttctactctgggtaaaattctatcaaacagcatcacatactacagagaaatattttgtgaaagaagtcaattgatgtggcaaactcactgttgtctttttttttttttttttttttttttgagatggcgtctcactctgtggcccaggctggagtgcagtggcgtgatctcggctcactgcaagctccgcctcccgggttcacaccattctcctgcctcagcctcccaagtagctgggactacaggcgcccgcaccttgcctggctaattttttgtatttttagtagaaatggggtttcactgtgttagccaggatggtctcaatctcctgacctcgtgagccactgttgtcttaytttaagaaattgtcacagccactcaagccttcagcagatcccaccgtgatca

SEQ ID NO: 957036 - DNA, 774 bp, Homo sapiens
gtcctgggcttccagaggaaggaagaggcagcaatctttgctgttctgcagcctctgctggtgatacccaggcaaacagggtctggagtggaccttcagcaaactccagcagacctgcagcagatgggcstgactgttagagggaaaactaacaaacagaaaggaagagcatatccactcagagaccccatagaaggtcacccacatcaaagaccaaatgtagataaatccatgaagatggggagaaacaagtgcagaaaggcttaaaattctaaaaaccagaatgcctcttctcctccaaaggatcacaacttttcaccagcaagggaacaaaactggattgagaatgagtttcacaaatagacagaagtaggcttcagaaggtggataataataaactcctctgagctaaaggagcatgttctaacccaatgcaagaaagctaagaaccttgaaaacaggttagaccaattgctaactagaataacccatttagagaagaacataaatgacctgatagagctgaaaaacacagcatgagaactttgtgaagcatacacaagtatccatagctgaatcgatcaagcagaagaaaggatatcagagattgaagatcaacttaatgaaataaagtgagaagacaagattagagaaaaaagaatgaaaaagaatgaacaaagcctccaagaaatatgggaatatgtgaaaagatcaaatctatgtttgattggtgtacctgaaagtgacagggagaatggaaccaagttggaaaag

SEQ ID NO: 957037 - DNA, 566 bp, Homo sapiens
gtatgatggttcacttaatggtgtcccattagtccattagtctctgtttaytctcctttattttttccttttttctcttctcactcagtaatttcaaatatcctgtatcccagctattttattcttcttcctgttaatgtctgtgtttgcatgcctctagtaaatttcacaattcagatatatttttcagctccagaatttctagggtttttttcttgtttttatagtctctattttttttgttgaagtttcattttgtttatatatagttactctaatttcctttacttcatcgtccatgttttttagccctttgaatacatttaaggaagttatttaaaattatttgtccagtatgtccaatgcttgtgtttcttcaggaattgtttctgacacttcacttaactcctttgaatagtccacatattcctatttattttatgccatgtggtattttgtcattcctaaaaattgagcattagaaaatacagccacctctcctagtctttgcagactgactgcacttggtaatgcctttcctaattatcaaagcatgttctgagact

SEQ ID NO: 957038 - DNA, 589 bp, Homo sapiens
gggcaggaagtgtgaggaggaaaatagattttgaaagttatgggaactgtagagggttagtggagcatagcttgtgatttttagggcctctaaaagtattaaagcggcagcaatgaggtgtggctgtagcctaggaatagtcagggaagcggataatttagttaaaatgtctcaatctaataagggagctgggcaggtggggataactaaaaaagagtgcataaaagaatgttgtccaagttggcaccagagttggggagttttaaggggtttagaagccttgctgtcaatacccacaacagttatggaggcaagggaaacagtcccttaaaaagaaggtaatgtggagtgggtagcctccatattgattaagaaggggacggacttaccctccactgtaagagttacccaaagtgtctgtgatggtccaggaggtttccgaggcgattaggcartgtcagtcttcaactgctaagccacgaatatctgggaaggagtcagtcagagagccttgggccagagttccaggggatctgggagtggctgccaggcgagttggacagtccaatttccagtggggtcccgcaca

SEQ ID NO: 957039 - DNA, 561 bp, Homo sapiens
atgaataccccattctccgtgatgtgcttatttcacattgcatgcctgtatcaaaacgtcttaagtaccccataaatatatacacctactgtgtacccacaaaaattaaaaataataaaaaataaaactgaactatgcttcatgataaaaactcttgttaaattagttgtagaaagagcatacatcatcacaataataaccataacatacctcatcacaataatgaccatatatgataaacacacagcaaacatcataatgaatggggaaaacctgaatgtgtttcccctaagaactgggcaactatgctcactttcactagtcttattctacatagtactggaagtcctagccaaagcaattaggtaagagaagtaaataaatgacattcaaattgggaaagagaaagtcaaaaggtttctctttgaagatgacttratcttataagtagaaaaacctaaagactccacccaaattcccttagaactaatacacaaattcactgaagtggcaggatagagaatcaacatacaaaaatcagtagtgcatttacataacaat

SEQ ID NO: 957040 - DNA, 561 bp, Homo sapiens
atgaataccccattctccgtgatgtgcttatttcacattgcatgcctgtatcaaaacgtcttaagtaccccataaatatatacacctactgtgtacccacaaaaattaaaaataataaaaaataaaactgaactatgcttcatgataaaaactcttgttaaattagttgtagaaagagcatacatcatcacaataataaccataacatacctcatcacaataatgaccatatatgataaacacacagcaaacatcataatgaatggggaaaacctgaatgtgtttcccctaagaactgggcaactatgctcactttcactagtcttattctacatagtactggaagtcctagccaaagcaattaggtaagagaagtaaataaatgacattcaaattgggaaagagaaagtcaaaaggtttctctttgaagatgacttaatcttataagtagaaaaacctaaagactccacccaaattcccttagaactaatacacaaattcactgaagtggcaggatagagaatcaacatacaaaartcagtagtgcatttacataacaat

SEQ ID NO: 957041 - DNA, 727 bp, Homo sapiens
accaaagcccagtaacaggccaagagctgtctctcaaaaggagagtagttatctgcagaagatggcagggccttgctccgaaagcctagagaccgccactgtgattcacctatgggggcctgccaaaggctgcagccagcatccttatctgccactgacacctcaagcaacattggatctgctgggtcatatggcccaagtggcagagcaacttgcacaacagcctggacctgtcatagagctttctcctgttctggaccccactcaaaactggcagcctttcaggtcactcgataaatgtgctggagtaacactcaaacgaggaatgtgttgcctccaaaatccaataggcccactaggcgttgtgtctctttcttggttgtaggtggggccaaatgcaggcaacttatccttcaccttggaatatctcgacaggccccaaaccactggacccctagaaattttactgaggtagaaggtccctgaattttattatcagatttattttccatcctctggcatgcaaatgtctcactaataagtccagtgtgtttgctacttctcacttactggatccaatcagcataatgtcaccaatttaatggaccagcgtgatatcttgcagaagcgaaatgcgaycaaggtctctccgaataagattatgacatgaataagattatgacacaaagccggagagttgatacacccctgaggtatgacagtgaag

SEQ ID NO: 957042 - DNA, 727 bp, Homo sapiens
accaaagcccagtaacaggccaagagctgtctctcaaaaggagagtagttatctgcagaagatggcagggccttgctccgaaagcctagagaccgccactgtgattcacctatgggggcctgccaaaggctgcagccagcatccttatctgccactgacacctcaagcaacattggatctgctgggtcatatggcccaagtggcagagcaacttgcacaacagcctggacctgtcatagagctttctcctgttctggaccccactcaaaactggcagcctttcaggtcactcgataaatgtgctggagtaacactcaaacgaggaatgtgttgcctccaaaatccaataggcccactaggcgttgtgtctctttcttggttgtaggtggggccaaatgcaggcaacttatccttcaccttggaatatctcgacaggccccaaaccactggacccctagaaattttactgaggtagaaggtccctgaattttattatcagatttattttccatcctctggcatgcaaatgtctcactaataagtccagtgtgtttgctacttctcacttactggatccaatcagcataatgtcaccaatttaatggaccagcgtgatatcttgcagaagcgaaatgcgatcaaggtctctccgaataagawtatgacatgaataagattatgacacaaagccggagagttgatacacccctgaggtatgacagtgaag

SEQ ID NO: 957043 - DNA, 606 bp, Homo sapiens
agtatgtctctgccaattctgcattctggcactgggaaaatgaccacaggatgagtccggggacccactggacccactgtaagtcagacctgagctaaaactccattaattacctgacytccttaagcccctatttaactggagggccacaatgacgttttgggtcccctggaatcaacctcagctcagaatcagtgtccaatagtccccaaaatgtctgatcatttccctttccccaatgcagttactctggtaaaaggccagaggtctctttggggaaggatgggagaaagattcactgcataaattgtcagtaatgtagtggggtccttcctcaagaggacccgcctccccttcattcaaggggttctgggtctgtaaactggttcaagtctggaaattgattgaggggccgtgattctctttttttgtaattcaaattagtcttttgtccacttgatctagaagttttcggcttatacaaatcaagtaggaatgcagtaggcttcctatcaatttcacttctaggaacactgtgattaattagccaatgccagagctctacacgagacagactattctgattgctgctttgcctctgctgtc

SEQ ID NO: 957044 - DNA, 650 bp, Homo sapiens
ggccgagacaggagaattgcctgaacctgggaggcacaggttgcagtgagctgagattgcaccactgcactccggcctgggtgatagagcgagattccgtctcaaaaacaaacaaaaaarccaaaaaaacctcagaactctcaagcaggacttctcaacctcagcactgttgacttttgggtgggacaattctttgttgtgcgtgtggcgggatggaggtgctacgccatgtaccttaggatgcttagcagcacgggggcctctccccaccagacgccaggagtggtctccctcctccgggtagatcaccaaaagttctccagacattgccaaatgtcccctgcagggcaaaatcgtcctcggttgaaattgtccactgctctaaagaatgcaggaagttgggcacacttagctcggaatgaatatttacagggaacattaaagctgtttgtaggcatcgtacgaaaaaagttattctgattgtttcagaaggctgagcaagaacaaacggggcaaacctgtattttgactaaggaacaaggagacctttctagaagaaccgctcagctcccagtccccaaagtgtgtatgtttagaccgggcgaggatcctgaatcaaggtccgggcctctttcctcggaagaacagac

SEQ ID NO: 957045 - DNA, 607 bp, Homo sapiens
gaggccgagacaggagaattgcctgaacctgggaggcacaggttgcagtgagctgagattgcaccactgcactccggcctgggtgatagagcgagattccgtctcaaaaacaaacaaaaaaamcaaaaaaacctcagaactctcaagcaggacttctcaacctcagcactgttgacttttgggtgggacaattctttgttgtgcgtgtggcgggatggaggtgctacgccatgtaccttaggatgcttagcagcacgggggcctctccccaccagacgccaggagtggtctccctcctccgggtagatcaccaaaagttctccagacattgccaaatgtcccctgcagggcaaaatcgtcctcggttgaaattgtccactgctctaaagaatgcaggaagttgggcacacttagctcggaatgaatatttacagggaacattaaagctgtttgtaggcatcgtacgaaaaaagttattctgattgtttcagaaggctgagcaagaacaaacggggcaaacctgtattttgactaaggaacaaggagacctttctagaagaaccgctcagctcccagtccccaaagtgtgtatgtttagaccgggcga

SEQ ID NO: 957046 - DNA, 552 bp, Homo sapiens
acacagacaccaaggaaggtgctgtaaagagttgcatctatggccctgatcaaccagcaaagctcgcatttgttcacaccactagagggcaattgacctgtttgccgacccccccaagtagagagcaattatgcatctgcagttgatcaaatgttggtcttacgaccacatgagtaaacaagctatttagataaatgttcctttgtatctgtgccccaagcaattaactcaaggtaaggattacgctgctttcagccataaccctatcttgagacttttgcaaataccttccggccttccaagaaggtttgtgtctatatcctataattttacaatttctcccaccatcctgactgaacccccacactagactaaccaagaaaagaaaagagaatacccaagtaaaccatatcataaatgaaaaagaagctattacaacagatcccacataaatacaaaagataatcagaaaccattatgaacaaayatatggtaacaaactggagaaacaagaggaaatggataaatttctggaaacatacaacttaccaa

SEQ ID NO: 957047 - DNA, 598 bp, Homo sapiens
gaaatttgatagtatgttcttagcttggcttttagctgaataaggcctttaaaagtcaaatctgagattctatatgaaaacttccagcaaagaaacttgaaagcacctatgtggtcatcgcctgttcttgctgcagttacataaataatcaagcaaaatctaataaaacaagacttatttttaaaacaagaatagtcttactttgattatgataaaaaatgatggttactaccaagagaaattttatatttcaaaggaaaactataacatggccggcatggtgcacatgcctataattccagcactttgggaggccaggagttcaagaccagcctgggcaacatggtaaaaccctgtttctaccaaaaatacaaaaattagttgggtatcatggcatgtgcctgtagtcccagctaatcaggaagctgaggagggaagatcgtttgcacccaggaggtagaggttgcagtgagctgagattgcacctttgcactccagcctgggtgacagagccagaccctgtctcaaaaaaaatgtttttaaaggaaaactacagcctttgtkggttatcagattctagtcttgtttcttgtttctg

SEQ ID NO: 957048 - DNA, 588 bp, Homo sapiens
agactatcttgaattatggtgggcccattgatattataacaagtgtctttataagaagcaggcagagggatactacagaagaggagaaggtgatatgatgatggaagcagagactagaaccatgggctttgaagatgaaaaaagaggccacaagccaaggaatacaggcagctcctacaagctgaaaaaggcaaggaaacagattctaccccagaacctccagaaggagaagtctgatgacaccttgactctagcccttagactcattttgaacttctgagcttcggaaataagaacacatttgtgttgttttcagccactaagtttgtagccatttgttacagcagccatgggaaacattggccaaagcaagtcactggccaagcccacattcaaggggcaaggaaacaagactccacccttcctgtaaaaaatcttttagcttttattttagatacagggagcacatgtgcaagtttgttccataggtatattgcacccagggagygagcatggtacccaataggtagtttttcagttctttccccttcactccctcccctcagtagtccctagtgtttattgttg

SEQ ID NO: 957049 - DNA, 717 bp, Homo sapiens
tgtagcttcggagagtctggccagggatggccagactccaggggaagataaccttcccactcagtcccattttcagctccccttcccgctgagagccactttcatcagcaataaaatcccccacatttaccatcttcaattcgttcatgcagcctcattcctcctggatgccagacaagaactcgggtgccacgagtgcaggtgcaaaaggctgtcacactgacccttaaccctcgctggcagaaggcagccgcctcacatgaaaaggcagaggggcccactgagctggtaacacttaagccccgacagctgggttaaaagagcactggaaaacttcctctgaaccccaggtgctgctgcggggctggtacaaagtttgttcctgcctcgctcacctgcgtgctccctccctggagggtggaacgaaggaggtttgagtgagtggagtccacccctgccagtgccagagcagccagctgactccagcactcgtgtactccagctcccgcctgcgaagcagtcgggaaatgtctggcttcacctgcacctagttgaaaaagtcagtcctgtaaggcacaaagacccacggttctctcctcctctaatcccactccccggaaggagacctttggtagattatttttaccctcaaatttccaaaaagtgtactgatatcattattttatgatctgyacattttagatgggctaatgattt

SEQ ID NO: 957050 - DNA, 698 bp, Homo sapiens
agttgtgaaaaagtttaaagagccagcatcgtggcccttaaagaaccatgagcacacgctaaaagtaccctcagtaattcaatcaactatasaacaggggtaagacaaactggcctttgggccaaatctggcacaacgcctatttttgcaaataaatattgtctgaacatagccacgtttatctctttgagacagggtcccaccctgtcacccaggctggagtggcacgatcttggctcactccaacctgtctcctagactcaagcaatcctcccacctcaatctccggagtcgctggggttacaggcgtgcaccaccaagcttggctaagttttgttttgttttgtttttcttttagagacaggatttcactatgttgcccagaccggtcttgaactcctgggcctaggtgatccacgcgcctcagcctcccaaagtgttaggattataggcatgagccaccaacggtgcccagtccaggccacttctttacatattatctacagcctacagcttttgtcctaaaacagcagtgctgagtggctataacagagaccaccatttggtttacaaagccaagcatacttactatgtggccctttacagaaagtttgcctatccctgaaatagagcatgaacattcacttatgggcagggggtggggaatcaacagaaaatgcttagttttaaacttacca

SEQ ID NO: 957051 - DNA, 792 bp, Homo sapiens
gaaatttatagtactaaatgcccacatcagaaagctagaaagatctcaaattgacaccctaacatcacaattaaaagagctagagagtcaagagcacactaacacaaaagctagcagaagataagaaataactaagatcagagacgaattgaaggagatagagaaacgaaaaaccctccaaataatcaactaatccaggaggtggtttcctgaaaaaattaacaaatagattgaccgctagctagactaataaagaagaagagagagaagaatcaaatagacacaataaaaaataataaaggggatatcgctactgaccccacagaaacacaaactagcatcagagaatactataaacacctctgcacaaataaactagaaaatctagaagaaatggataaattcctggatgcatacattctaccaagactaaaccaggaagaaattgaatccctgaatagaacaataataagctctgaaattgagggagtaattaatagcctcccaaacaaacaaacaaacaaacaaacaggaccagacagattcacaggtgaatactaccaaaaatacaaagatgagctggtaccattccttctgaaactattccaaacaattgaaaaggagggactactctctaactcattttatgaagccagcatcatcctgatacaaaactgggaagagacacaacgacaacaacaacaaacttcaggccaatatccctgatgaacattgatgcraaaatcctcaataaaatactggcaaactaaatccagcagcacattaaaaaac

SEQ ID NO: 957052 - DNA, 612 bp, Homo sapiens
ttaatcaactcaatgtatgtgatttaaattcaatgtatgtgttgactaaaactcatatttgaagtttccttcttgattctaagttctgaaattctgaacagggcctatgtgctgtatctgctgttatgaaaagttgccattgtgccatggtgtgacctgagcccagcatccagcagggcctggcacccgtgggggtagatagtgcacttttgtgcattttttacataggtataataacgaagagaaaaaaaggacttgtgcagggctacaggctttctaacaatgatacattcacgaggattttgaatatatcacagggaaacatttggaaaaacaattcctgaatcctataaaaaatgagttaattggccagtgcaagtttatgtgttagtggcctctagtttgctaaattgtaacaaacaacactgtcctgtgtatatttttttattattttcatttctgaaactagtcaaactttgttgaaatggaaaggtttgtaaaattccttaagcacttccatgaaacagcttggtatgaaagtcattgatttcgttcccacctgcaaatttacagatraggaagttttggcccatgaaagttaagaaacacacc

SEQ ID NO: 957053 - DNA, 771 bp, Homo sapiens
ggaatcatacctaagaaatatttgcccagaccaatattctggagcatttctcctatgtcccctcatagattcacagactcaggtctcatgtttaagtctttaatccatcttgagttgatttttgtatatggtgtgaggtagggtacaatttcactctaatgcttgttgacatccagttttcccaacaccattaattgaagaagctatcttttccccattgtgtgttcttggtgcttttgtcaaaactcagtagaccataaatgtgtgggttcacttctgaactctgttctattctgttggtcaatgtgtctgtttatatgccaatgccatgctttgattactatagctatataatagattttgatgtcaggtagtgcaatgcctccagctttatttttttttgctcaagatgcctttggttatttgaggtcttttgtggttctatacaagttttaggattgttttttctttgctgtgaaaaatgactttgaaattttgatagagcttgcattgaatctgtacatcactttgggtagtatggacattttaacaatattaattcccaatccatgaacacaaaaacatttccatttccagtcatgcactccataatgacatttcagttagacaatgaactgcatagacaaaagtggtctcctaagattataatggagctgaaaaatccctrtttcctagtgacatcttgatgatcctgaccctgtgtagataactaggctaatgtgtgtgtgtgtctcctagtttttaagaaaa

SEQ ID NO: 957054 - DNA, 858 bp, Homo sapiens
tggccattctgagagctttggcaaatgtatgtggtttccatcagcttggtccagtgatcaccaccacaatcaatatggagatggtttctatcagctcaaaaactcactgcacctctttgtcagataagctgctcggcgtactccagcctctgggaatgaatggcctgttttcagtccctatagcattgccttttccagaatgtcatataaatgaaatcatacaggatgtggccttttgagtctggcttctttcgccagacataatgatcctgagatttatccatgtagttgcatgtatcagtacttccttcctttttatgggtgagtggtgttccatggtgtggatatacagcaatttgtttaaccattcacctattgaaggatgtctgggctgtttccagttgacattacatgccaaggactctacacatttgcatacaggttttggtgtcatcatacatttttatttctcttgggaaaatatatagaggtaagattgccaggtcgtatagtaaatctgtttaacttaatgagaaactacccaactgtgttccaaagagactactactttgcattcccatcaggaatatataagagttttagttggctgggcactgtggctcatgcctgtaattccaacactttgggaggccaaggtgagaggattgcttgaggccaggagtttgagaccctccaaacctcaacatggtgagacccccatcttttttttttttttttgagtcagttttgctcttgttacccaggctggaaygcaatggtgcaatctcagctcaccgcaacctccacctcccaggttcaagtgattctcctgcctcagcctcaggagtagctgggatt

SEQ ID NO: 957055 - DNA, 709 bp, Homo sapiens
ctccaggtgcctctccctcctggaccttgaggacagccagcccaggctgttgtgttgctgttcaaacccaacatcctcagactgtcccggcaaacagacctgcccagagctccacctgtctktctttcatatcttccgtgtttctttcttcaaaatccaaaagtacctttgctaggataatcgggcctgcaatctgcctggtccctggctccatgggacctacaaacaacccacaaatgacaccacataccaagaaggaaacagggtgggagggctggaagaactaagaggcaacagtaccaacaggtaactccagacatcatggctcttccccagcccagggcggagataggaaggagttgccagaaaggggagaggagtctcccagcctcgctggggatggggccaagtccaggtagagaagggcaagcgccggcccgctggcttcagcaggggcaggaccccctccaattctgctctaggctctctgcaccaggtgcagctcacttctctgaagatgaagcaggcataggcccagcacacgtgcctgctgggagatcaggcacagacaggcacggggggcaacccacggccagcgccctggctgaggactgggagggaaatttggaagggctggaggacgattccctgagacccatgaaggctcactgcagggggtagggcctcttttctgctgtgggttctgaag

SEQ ID NO: 957056 - DNA, 650 bp, Homo sapiens
caccacctgattttccagacggggaggttgggacctgaagcagcagsccctggggggtgtccagagccagagcctgggggtctcccagtagggcagcaggtgggctccagccaggtcagcctgccttcctgggttcgtctgcccagagggcgttttctatgacccagcctgaacggagctagaaaccaggcggtgcctgggtgcgtccatccctggctcatgcacgctgtgcttccaggaggcgggccctgcaagcagcagtgccgagacacgggtgacgaggtggtctgctcctgcttcgtgggctaccagctgctgtctgatggtgtctcctgtgaaggtaatgtccctatcccaggtgccagcaggactggccggtcactgtgcttgggagctctgtgctggaggactgaccagggcctgccttctacaacccagaccccattcaggggtggagagcagcccaggacgcgctttctcgtgttcgctggagtttgcagcgcagaggcccctgccgagacttccctccaagacaatataagcactggggttgggaaagaggatggagttggggtctaaccaggttccggatccaggatctgctgagtggccttgggcacatccttcagcctctcctggcccccgcgtct

SEQ ID NO: 957057 - DNA, 638 bp, Homo sapiens
agcaggggagagaaatcactgctttcgactccgtgcagtccacagcccggatgtgcacatggtggacctgagctcagtttgcgagggtgcagggaagcacttccaccgtggctttggcacattcctttctaggatgtattaggatgggtcgttcttgctggtcacccccgcactgcctcggtctctcctagatgtcaatgaatgcatcacgggcagccacagctgccggcttggagaatcctgcatcaacacagtgggctctttccgctgccagcgggacagcagctgcgggactggctatgagctcacagaggacaatagctgcaaaggtacagcatgcgctccgagtctgcaaacctggtcttccaggcgtagatacggcgcggtgggaagggcagctctggggtctgggctcccgcagtcctgcgccctctgtggctgcctgggcgactgcctgctcatctgcaggagggaggtggttatacccaccagggtgtctggacaggtgggatggaaggtgaaagtgcttgccaataatgttcagaacattgaaaaagttgacagtagtgcmccggtgccagctagttcagctgttaggaaagatttacgttcttatggtgcagagtaaacgatggcag

SEQ ID NO: 957058 - DNA, 624 bp, Homo sapiens
agagagccaggatctgaaaactgactcccaggtggctgcctggaagcaagaacccccaaggtgtctttctgctgcttctctgggttctcagaccagttaacaatgrcatcccctttcatggggtgaatcccatgttcctgacactaacacattatgctagatatgtatagtaagtagccaacttaatcctttcaaaaccacagggaagtgtttcttattacttcaacttttaagtgaggaaacggaggcggaggtcacttagtggtccagtcacagacaaatggctgggcttggattgacttggaagtcaagtctttctgaagcaaaagtctctgctgttaaacactgctctgctgacctctaaggccaagaccaagaccagggtccacttcaggctcttttggggcattttggctcttggctgcaaacccaaccagaactgccagaatcctacctggaactcactcaaggtgctagaattaacctgttctccaaggttacattgatcaggaaggtttgcattcagagatggggacttcattggtgtccatggacctactgagatagccagagtttaggagaaagtttggcttttgaggatgggccagacagcaagtgaccaga

SEQ ID NO: 957059 - DNA, 571 bp, Homo sapiens
caatagaaaatggctacttgaggaccagatatgttcaccatggaagctccatctttctatttttcttagcatgtgtacagttagaaagaagtaggcaacatggagaagctcagggacagaaccgacctgcataataaaacatctggatgggggttccagagatttgcaccctatgaagatggcacaactggtcctaaccagtttcttataccctatgtagatcagacactagctcttgtataaaaatgcctgaattcattattgattggcaacagatttttctgggatccccctctgtagcagagagctactatcttttttttttttttttttgcctatcaaatttctgctcttatcctcactctttgtatgtccacattcttgattttcatggtcatgagataatgaacttcaggtgtcatgccagacaacgaggctgcttcatcagtaccatccaggaaacataagttcaccratgaactaaataaggcaccagggatcaatcctggagacagacctatatgaactttcagacatagaattcaaaacagcagtattgaggaaactcaaa

SEQ ID NO: 957060 - DNA, 512 bp, Homo sapiens
actctaccaggaagaattctacccttttttcactggagaacatgggcgagtgtggctggaagccttgcttgggacatcygtccagtgaggaggagcaggatctggtacccacttaaagcagcagtctggtcacatgttgatagagcagctgtgttgtactgggggatccctaacatccccagtaggctcggactctccaaagcctgaaggctgaaagggctagggtgcccaaacggtaaagatggaggcctgtgcctagcttcaagagctccttcttagggggatgcaatatcgccattggtggctggctggaatttcaagtcaatgggtcttatcttgtgagatgccatggaagtggggccttcaggctgtcactgctcaggcccaaggagtaagcctcttttataggagtatgtatgggtgtctaacctcccactttgctggaactttatttgttggaaaggccaagtatcttaggctagctgtgcatgcatgagtggctgctctgctga

SEQ ID NO: 957061 - DNA, 589 bp, Homo sapiens
catacctgagcaacagatttttaagggagggcaacactcccatactgtaccctgaatgagctgtagcttcactctgcaccctggagaaatctctacatactgctgctttctgtacagagactgagtgtccactcacgccagcctggtgtgggctcaacaggaccagaggctggtggagtggacaaagattcgaagacacttggaaattcactcggtatagaatcagagacctgggttcaaatccaagtggtgctactttctaaaagtgtgatctggggcaatgaaatcaatgacaatgatttaactgtcccagttgtgactcagtttcttcctctctaaatggggctataataattattattacacacttaatttagtgattatcctgatccaggcattgtgtttagcatttcacattatactaactcatgtaatcctcactgcaaccctatgaggaggtattgttattattattattaggaggaggagggggagtattacagataagttactgcccacggtcacacagctgctgtcmccgtggcaaatctgggatgtccaccaaggcagcctgcagcctgctccagaa

SEQ ID NO: 957062 - DNA, 607 bp, Homo sapiens
gtctaggcagtaaagcaccaagaacttcttgcttaagaagaacatggaaaaataattggaaaatatttcacaaacaggagcaaagggagaaagcaaaattaatgcttttggctgacagtctgtcttctagaatgactttctttggcctcaggaaacccttggactctaggtaaccaagaagtgtcttggaaagacctctcaaatctaaaattcagggaaacccagcaccatttcttgcaacgccacaaagaggcaagtgcagatcctaacccgcactccgcttcaaaggtgcttcacttttgagatgtcggttctgaggtggtggtggttgtttgacagccgtatattattaataccttcaaccgccaatactaggagctccgatcatgttttgatgaccaacacgagtctaacatataagtaagcttgggaattttattcttcaaaaccacaggtaacaaatttcaaatgctaartttttttttttcaatcaagtacagaagaaaggaaacaccttcatttattttctaaagtctattcttcaaaataatttctccttctttttctgtctttgcagtgatcataaaagggcattttattagtccat

SEQ ID NO: 957063 - DNA, 597 bp, Homo sapiens
actacaggcatgtgccaccacatctggctaaattttgtatttttagtagagatagggttttgccatgttggccaggctggtctctaactcctggcctcaagtgatcctcccgccttggcctcccaaagttctgagattgcaagtgttagccactgtgcccagccctcagttaacatttttatcatgaatgccatttggtttgactttgaagtcagaccttgattaattcttccaccatcattacccctttggtataggctgtgaattccggggctctgttaaccacatcacgtgactttaatgggtctctggtcttggctcagatttgggtctaagttaaccttccatttaaggcctctctgaaataactttggaattgggttactattgcaccaccagtgcccctctgatttgatcttcaagcaggatatttgttaatgttttctccatccatacaccctgatagaggtcttgaatcctaggactttcttaactattgtaaccatcagagttcccgttttgtatcgaacatgaacctttgttaactctgcaatcctgttccgsgctgacttccaatccagccctttgttaagtcgt

SEQ ID NO: 957064 - DNA, 572 bp, Homo sapiens
ggatgcatagtaactgaaatctcacacactgctaatggaaagatacactgatataaccattttagaaaactggccttgtctactaaagctgaacatatgtataaaatatgagccagcaattctattatttggtatctgcccaacagaaagcatacatatatgcaccaaatatatgtacaaacatattcatagcagtactatataggcctgggcaatatggcgagaccccatctctacaaaaatacaaaaattagccaggcgtggtggtgctcgcctgtagtctcagttactcaggagactgagctgggaggattacttggacctgggaggtttaggcggcagtgagctgtgatcacaccactgtactccagcctgggcgactgggcaaaaccctgtttccaaaaaaaaaaaaaaataagatgaaagaaaaattaaagttaacagcagttgtcttttctatattttctactgtaaacatgatgtagtatttttataattaaaagtaayttatttttaggccgtatgcggtggctcacgcccgtaatcctagcactttggggggccaagttggg

SEQ ID NO: 957065 - DNA, 558 bp, Homo sapiens
caaacttagaggcttaaaacaacacaaattttsgccaggcatggtggctcacacctgtaatcccagtactttgggaggccgaggcgggtggatcacttgaggtcaggagtttgagaccagcctggccaacatagggaaaccccatttctactaaaaatacaaaaattagctgggcgtggtaatcccagctactcaggaggctgaggcaggagaattgcttgaacctgggaggcagaggttgcagtgagctgagatcacactattgcactccagcctgggcaacacagcaagactccatctcaaaaaaaaaaaaaaaaaaaaaaaaaagaaagaaaagaaagaaaaaaaagaaaagaaaagaaacccataaatttcttctcttacagttctggaggctgtggtgtgggtggggctgtgctccttcaggggctctaggagagaatctggtcactcattgcccttctggcttccagaggcacctgcattccttggcttgtggccatttcctgcagcttcaaagccacagaggtggcatcttccaatctctctctgttccca

SEQ ID NO: 957066 - DNA, 558 bp, Homo sapiens
caaacttagaggcttaaaacaacacaaattttggccaggcatggtggctcacacctgtaatcccagtactttgggaggccgaggcgggtggatcacttgaggtcaggagtttgagaccagcctggccaacatagggaaaccccatttctactaaaaatacaaaaattagctgggcgtggtaatcccagctactcaggaggctgaggcaggagaattgcttgaacctgggaggcagaggttgcagtgagctgagatcacactattgcactccagcctgggcaacacagcaagactccatctcaaaaaaaaaaaaaaaaaaaaaaaaaagaaagaaaagaaagaaaaaaaagaaaagaaaagaaacccataaatttcttctcttacagttctggaggctgtggtgtgggtggggctgtgctccttcagggrctctaggagagaatctggtcactcattgcccttctggcttccagaggcacctgcattccttggcttgtggccatttcctgcagcttcaaagccacagaggtggcatcttccaatctctctctgttccca

SEQ ID NO: 957067 - DNA, 604 bp, Homo sapiens
acgagaaacttttctcagcctgatcgcatcccggcttctaagaagggcctggttcaggctttcagcctgaagccggagagcacgaatgagccctcccctgacttcaaaaataaaatcccggtacagtatgatcatcatgattattgttaccattattaccagcactgcaatcatttgtgctctggccctttcatcccagaatttcaaagcagaatgctttataaggagatggctattcatttgttcagcgagaggcatcctttgaaaatggagctttcagactcttgatgaaaaaaaaaaaaaaaaaaaaacctctgatttccactcagcgtgattaaccagacaagggctttcctgagaatgaatgtgtctgttgagtggggtccagacaatgaggtcagaggcgagctcccgaaacactccaggaagcagcacctcgggtgtccaagcttctgagactctctgcagccccctcccatggtcaccgtcttctraagggctgtaggatcgaaagtcacaggcgcaccggcagcagagcagcatggctaagccacaggttccggcaggtggcttgggctcaaaccctggctttgcatctgaaatt

SEQ ID NO: 957068 - DNA, 558 bp, Homo sapiens
gcacagcacggggtcttgcccaagacctgctgtaaccactccttagctattgcatgagtttgctgaaggccctggggctctacagtcatcacatggtaaaaacagccaggcctgtgtccttcccttcaggatggcaagttctcctagcctccaggtggatccaaaggtgctgtctgggaatcagggcctagatcaaaaactgtaaaagtctacgtagtgttttattgtgctatggctgagctgtcactcaaaccacaagatgcagtccctcccactatttccacccctgtccaaagacagaggagcatcaatccagggccacctcaaacacaggccatggggaggtactgccagactaccaccaatgttctcataaggcccaaaggctcttaagtcagtttgcagtgaatgctcctgttaattatttttaaatgcttttttttttttttyttttgagacggagtctcaccctgtcacccaggctagagtgcaatggcatgatctcggctcaatgcaacttctgcctcccaggttcaaatgattctcctgcctcagcct

SEQ ID NO: 957069 - DNA, 572 bp, Homo sapiens
gtttggcattcaaagcgtgatgtaggctgaaaaaaagagtttggcagttccttcaaaagctaagcatagaactatcacatgattcagcaattccactcctrgtatatacccaaaagatttgaaaacatacttgaatgcctatgctcattgcagcattattcacagcagccgaaagatgcaaacaacccatgtcatcatcaacagaaaacaaaatgtggtctatccattcagtggaatcttaattcagtcaaaaaagaataaagttctgatacttgctacaactggatgaaccttgaaaacatgctaagtgaaataaatgaggccgggcgcggtggctcatgcctgtaatcccagcactttgggaggccgaggtgggcggatcatgaggtcaggagtttgagaccagcctggccaacatagtgaaaccctgtctctactaaaaatacaaaaaattagttgggagtggtggcaggcgcctgtaatcccagctacttaggaggctgaggcaggaaaatcacttgaacccgggagggggagggtgcagtgagccgagatcgcaccactgcactcca

SEQ ID NO: 957070 - DNA, 668 bp, Homo sapiens
gagctctctcatatctgtggtcagctagcgggacagttggcagttgttgatctagaattgcctcactcccatgcctgggagttggcaggcagccagggcaactgagttctwcatgagcctctcatgctccagcaggctagtctggggctgttcacatggtggcatcagggttagaagtacagcaagagagcaactcctgatgtgcaattttcaagcctctgcttgtgtcatatttggtaatgtcccattggcctaaccaagtcatatggctaacttacattaaaggaatggagaaatagactccacctctagatgggaaatggagaatttgtgaacatttttgtaatctccctcacaggtcttcctccaaaatagctaaagcagccccagtcaatctccaccatatcaccctattttctcttcttcataggacctatcaccatcctaagttacctatttgtacatatgcttattatcaatcctcctaccccccacacaatgtaagctccatgaatgcaggggctcactttatcttgttctcctgtgttcccagcgccacgaacagtacctggtaggcattcagtaagtgttatgttgattaactgacttgcctgacgattggtgtggaggcagaataccagggggtgagaggaatcaaatgatcaatg

SEQ ID NO: 957071 - DNA, 465 bp, Homo sapiens
tcataaatagttcttattatttagagatatgytccataaaaacctagtttattgagagtttttaacataaagggatgttgatgttgaattttatcaaaggccttttctgcatctattcagataatcgtgtgatttttgtctttggttctgtttatgtgatggattacatttattgatttgcatatgttgaatcagccttgcatcccagggatgaagccgacttgttcgtggtggatatgttttttgatgtgctgctggattcagtttgccagtattttattgaggatttttacatcaatgttcatcaggtatattggcccaaagtttgttgttgtgtctcttcccagttttggtatcaggatgatgctggcttcataaaatgagttaggaaggaattcctccttttccattgtttggaacagtttcagaaggaatggtaccagctcctctttgtatttctggtag

SEQ ID NO: 957072 - DNA, 578 bp, Homo sapiens
cctggcacccgtggctagcctggcgcccgtgtgtgtgtgtgtgtgtgtctggctagcctgtgtgtgtctggttagcctgtgtgtgtgtgtgtgtgtctggctagcctgtgtgtgtgtgtgtggctagcctggcgcccgtgtgtgtgtgtgtgtctggctagcctggcaaccatggctagcctggtgcccgtgtgtgtgtgtgtgtctggctagcctgggacccgtggctagcctggtgcccgtgtgtgtgtgtctggctagcctgtgtgtgtctggttagcctgtgtgtgtgtgtgtgtgtttgtgtctggctagcctgtgtgtgtctggttagcctgtgtgtgtgtgtgtgtgtgtgtgtgtgtgtgtctggctagcctggcgcctgtgtgtgtgtgtgtctggctagcctggtgcccgtgtgtgtgtgtgtgtgtgtgtgtggctagcctggcgcccrtgtgtgtgtgtgtgtgtgtgtgtttcctcagtctttaaagatgctcacgttgctttctcccgtcccatacctcctctgctatcgatcgcttctctttcatcttcctctggctgtgtga

SEQ ID NO: 957073 - DNA, 578 bp, Homo sapiens
cctggcacccgtggctagcctggcgcccgtgtgtgtgtgtgtgtgtgtctggctagcctgtgtgtgtctggttagcctgtgtgtgtgtgtgtgtgtctggctagcctgtgtgtgtgtgtgtggctagcctggcgcccgtgtgtgtgtgtgtgtctggctagcctggcaaccatggctagcctggtgcccgtgtgtgtgtgtgtgtctggctagcctgggacccgtggctagcctggtgcccgtgtgtgtgtgtctggctagcctgtgtgtgtctggttagcctgtgtgtgtgtgtgtgtgtttgtgtctggctagcctgtgtgtgtctggttagcctgtgtgtgtgtgtgtgtgtgtgtgtgtgtgtgtctggctagcctggcgcctgtgtgtgtgtgtgtctggctagcctggtgcccgtgtgtgtgtgtgtgtgtgtgtgtggctagcctggcgcccgtgtgtgtgtgtgtgtgtgtgtgtttcctcagtctttaaagatgctcacgttgctttctccygtcccatacctcctctgctatcgatcgcttctctttcatcttcctctggctgtgtga

SEQ ID NO: 957074 - DNA, 617 bp, Homo sapiens
attttccccctaaaaatcctgactttgtcagtcaacgggaaacaacacatctgcccaaggccccccgatgaggtcccccatgggagtcacaacggggggatgatgttcctgctgggggcccyctgggtgtcagagctaaaggggtgtgtgattttttttttcttttttgaggcggagtctcactctgtcgcccaggctggagtgcagtggcacgatcttggctcactgcaagctccacctcccgggttcacgccattctcctgcctcagcctcccgagtagctgggactacaggcgcccgccaccatgcctggctaattttttgtatttttagtagagacggagtttcaccgtgttagccaggatggtctcaatctcctgacctcgtgatccgcctgcctcggcctcccaaagtgctgggattacaggcatgagccatgacacccggccatgtgaatttttttatccaaaaagaaccccgttttcctgcctacctacctcatccttaaaaaatttttaaatctatttccaaaggaaattatgtaaatttgtaaatagagcatttctgtagaatttttttggaaacgatgtctcactctgtcaccaaggatggagtgc

SEQ ID NO: 957075 - DNA, 705 bp, Homo sapiens
ggcacgtgagctgagtcagctttgrctgttgtgagttgtgagtgtggccctgggcctcccagtgcaggttttcatgtggacagatgtctgtgcctaagagaggggcagcagggtccctggaactctgtctttagggttccaaggaattgccaaactgttttgcccagaggcattctggttttcattcccaccaacagcatactaggtctctcatctcctcgtgtcctcgccagcacttcatgttctctgtctttctgcttgtagctctctctgtgggtgtgatgtgggcggtacgttttttttttgttttttttttttgagacgcagtctcactccatctccagcctggagtgcagtggcatgatctcggctcactgcaacctccgcctcctgggttcaagcgattctcctgcctcagcctcccgagtagctgggactacaggtgtacgccaccacacctggctaatttttgtatttttagtagagacagggtttcaccatgttgtgcaggatggtctcgatcccttgacctcgtgatcctcccacctcggcctcccaaagtgctgggattacaggcgtgagccaccatgtctggccgggcggtatgttcttaaggggcctgtggatgcttgagtttcaggggagctggtgccacttctgcctgccccacagcctcgcctcctgatggttggtgctgtggtcggc

SEQ ID NO: 957076 - DNA, 710 bp, Homo sapiens
aaagatataagggcatcagcgaggctcaactgtgtgttcccatctgcaaygataagcaaggaagtctgttgtggacataatgggtgctcagtgctgtgaatgtgcatctgatgtgagcttgttatttgctcagtacccaatgtggaaacacaactgtatgttgtgtgcccaccctgcttgccactctaagtggttctcagacatctgctgtggtcctactgtgtgctcaccatcatgagatggaacttgttccttattgtggggctactgcatgtcccctctagtaagtggagacaagggcatctcttggcccgcttaggcttattaccaggagaagatttgagccatttattatggaactaccctgtgctcacccctgaatggggacacatggacatatattgtcgatgtattattttggtgagaattggatgtaggtttccaagtcccctatctgggtgtacagggttggcttagatttatactcaatgtataaaacactaaagtttaggtatagttcgagttttataggcaaatgcttatctcaagatctctgtgggcctttttgtcccttatgttgttggaacttgcctacaagcattcacacacacacatacacatacatgcgcacacgtgtatacacaggaatgaatgtacatattcacgtgcgatcaccaggcacacatacaaaataaatgccctccgtatag

SEQ ID NO: 957077 - DNA, 569 bp, Homo sapiens
tatttattgaaaatacatttcttggccgggcgtggtggctcatgcctgtaatcccagcactttgggagactgaggcgggcagatcacctgaggtcgggatttcgagaccagcccgaccaacatggagaaaccccatctctactaaaaatacaaaattagctgggcgtggtggcacatgccagtaatcccagctactcgggaggctgaggcaggagaatcgcttgaacctgggaggcggaggttgcggtgagccaagatcgcgccattgcactccagcctgggcaacaggtgcaaaactccgtctcaaaaaaaaaaaaaaactacatttcttaatgagatggcccatattgttcctgttcccctctcatttactcccattcattcttgtagacatagataactattactaattgctagaataagagagggtccattattaattctattttgatttttttctttgtcaaaaatagactttgtttccatgmatatgtatataggaatggaagaaggatttttttttacagcaatttcactcaattctttgaattcttcatgaattacatacc

SEQ ID NO: 957078 - DNA, 608 bp, Homo sapiens
cactatctttctaaaatcatctttatttttctttcatttttgaaggttttttttttactgaacatataattttgaatttgtaacttccttattttcatatgttacatatttcatttgattgctttctggtcktcattgtttcttataagaaatcaaccatatattatattattataacttacatgttatgtgacttcttttttgactttttttgttttgcagcctttcattttaatattacaaagtgagttttttttgtgtttactctttttgaaatatcttgagcttcatggatttatgggtttatgtttttcattgatattggaaaatcttagtcattctctttacgtacttttctttgcacttttttcttttcttttgtcttttctaactttttgtctttcttgtgacttttttttaacttgttaaactcccatttcgcatttggaaaagcattttacattatctcactgatcacagaatgctgttttatattcttttctacacttaaccatttttatttctggttttatgttacgttggtctggtttcaagatcaatgagtattaccatgctgtgtatagtcttttgttaagtccacggaataa

SEQ ID NO: 957079 - DNA, 597 bp, Homo sapiens
tggttagtcaagatcatagattgttaaagatctagttcacctgggtgacctagttcaatagtttatgcaatacaagggggtctctccatcatcagtgacaagtggacaactggcttctgcttgaaccctaaactaagaaaggactctccaatagacaacacaatccattccattttccatttgcagactactgaacatattagagaaaactccttcaaatgtaactccttctaattgtctaccctaggtagacagagagaatacatctaattccccttccagaagaccaaccagcaagtattcaagaagagtcatcattcccctccctagttctcctcaaatcaaaacaacatcacctcccctgttcattgcttccaaatcacagtttccaggcctggcacttttatctacacatgctcttctctctcttttcaaatacaaatctccaaaactcacttcattcattcaacagcacttcactgaacatccattatgtgtcagggaatgtaatgacatttaagagttaycaatgagcaaaacagtcaaaaatccccaccaatgtggagcttatattcaaaaagaactaacccagaacaa

SEQ ID NO: 957080 - DNA, 635 bp, Homo sapiens
atggtgttatggggacgaaagcgttcaagagaataggaggaaataaaktggagtatagataagcctttaaaggagctttgctgtaaaggagagcaaaaaaaatgggtcaataacgggggcggggaggggggttgttttcttttaacatggcagggaaaacagcatgtttgtgtatgaaagggaaagatcctgtagtaaaaattgatgatgtagaagagggaagaattgctagagctgtacctttatgtaggcaagaggcaatggaggctggttcgagtgcagtggtgtttacaactaattgatcacaaccagttacagatttatttgttccttctccactcccactttttcacttgactagccctaaaaaaaccaaaaacatttaaaaaaaaaaaaaaaaaagagagagaggctatggggtcttgtgcatgaagtttggtcttaggaacctggacagttaatctgtagcagtgttgttcatagaaatataatgtgaaccacatgtgtaatttaaaatttttctagtagccacatttaaaaaataagaaatagatgaaattaagtttaatataatattttatttaaccaggtatatccaaaatactgtggttttaacatagaatcaatataacaat

SEQ ID NO: 957081 - DNA, 619 bp, Homo sapiens
ttaactattatggatataagatttttataggaattacattgaatctgtagatctcagcggggagtactgccatcttaaaaatattaacccttccaagctatgaacatgagatgactttatatttatttttgtctttctaaattgttttcagccatgttatgtgttattagtatacacattttttttcttactccctcagttaaagttattgctaagcaatatattcctttggatgctgtagtaaattgaattatcttgatttcctatttgtattttcattgcaaatctgtagaaaatactacagattttgagtgctgagtttggaatcttcaactttgttgattttgtttattaactcttagattagaagaatttagtgctaaaatttatgactttaaataaatttttggtaactacttaagactatatttagaaccatgtcatctgtgaatagagatagttttacttcctcttttctaattttaatgtcctttgtttatttgtgtgctgaattggtctaaaactttcgggacaatgttaaaattagtagcaaaagcaggtattctttccytgatcctaaccttagggaaaagattatgcctttcacctttgaatataa

SEQ ID NO: 957082 - DNA, 563 bp, Homo sapiens
gggttccaattagtgtctgtcctggcaatgtgccagaagacaggagaagggttggaggtcatctgagctggtargttaaaaacaggtataaatctcaggggatatccacagaggagcccatgtttttgctgccaagaaaacgtggcaagagctctgggtgcaaaaataacagggaatgtgtgtttaagaagtcacatggcatgtgaagtgtaactagagaaaaggcagacttgcccccaaggtgtacattctggcaggtgcacaaggccatttcaaaacacacacagagagaacaggaaaataggcagcgtgggttctttggaaagagccgattttagttgaacaagctgaagaaaccccagacattgcacagttttaggctttcgctctgccactctcatgagcgtcctgtccaggagggccattaatgtttcagttctaatcagtgtggaccccaggatccttcccaccacccctgaaagccacacatcagggtgagctgagatcagccagggggagcagagccatttgtggctgagaggaatcattctagtggttggtta

SEQ ID NO: 957083 - DNA, 467 bp, Homo sapiens
gggaaggagccggagctgggggcccccgagccctcttcaccctcagcagctctgcttctcctgctgtytgtgtgggggttctgagtaagatgtggtttggatggaggatatcactgcactaaaagaaaagaaaagaaaagaaaagaaaagaaaagaaaagaaaagaaaagaaaaatataatgagatttgagcaattgacatggtaggaatttcaagagtaaagggcggactgggtggaggctttgggggaggtggcctgaattcctggtcagcagtcagccgtgagactttgagcaggtcactgagtctctctctgcctcagttcttcatctgtaaaatggggagatggtacttacttcacaggattgttgagaggattcaatgagtggcatcttacatggccccttggcaggattcctggcacgtgacagcatttgatgaatgggagctagtagctattatcaagg

SEQ ID NO: 957084 - DNA, 819 bp, Homo sapiens
aaatcccccctcaaatgctgattacactctagtcgtggagactagactaataaacaagtggaatattggacaatgagaagtgctatgcagaggatttcaataaggtgttgtgtcgagaggggctggctagatggccacttcagaccacatggcccaagacaggctcatttgggaggtgacaggtaaatggaggtctgaatgaaaagaaagagccagcgctcctaaagcaagctcaggggcagcaaatgcaatgatcctaaggtgggaatgagggacagagagtaagagggggtgggatgagtgaggggtaagcaggaccccctgcataggagcaggcagcagaagagccttgcagctcagataaggaattgggtttaattttaagggaaaagggaaactgctggagagttttaaggggtgggtggagtcatacactgattttttactttaaaatatcactctgggccgggcgcggtggcttacacctgtgatctcagcactttgggaggccgaagcgggcaaatcacgaggtcaagagatcgagaccatcctggccaacatggtgaaaccccgtctctactaaaaatacaaaaattagctgggcatggtgacacgtgcctgtagtcccagctactcaggaggctgaggcaggagaatcgcttgaacccgggaggcagaggttgcagtgagccaagatcccaccactgcactccagcctggcaacagaatgagaytccacctcaaaaaaaaaaaaaaaaaattactctggctacagtgtcgagagtgggacagaagctggagctgggaaaacagagagga

SEQ ID NO: 957085 - DNA, 568 bp, Homo sapiens
acttatacccacttacaacttttcctaacatagtaagcatcactgtcatatatccattttctcaagacaaaaacctgygcaagatccttgattattttctttttcttacccccttccctattcagtccatcagaaagtcccgttgaccatacccaaaaacatatctgaattcatcgtcttctgtccatcttcactacagcaccacctcagtccattaccaaaattttacctggacaactgcaaaaaactaatctcccttctattcctatccttttcaatctctttctgtagagaaggcagtaccatttaaaaagcatgattcagatctctgtggcaggaactgccggtttcccaactcaatctccattgtcccttttctcattagtaatagacagcgacattcttcagcttcccttgcaactggatatagtcatgtgagtaggttctgatcaatgggatgtaagaggaaatactgggtaggacttttagaagatcctttaaaagggaggggatatcctttcatgttttggcttcttttctccttctggcattaaacatgctggctgga

SEQ ID NO: 957086 - DNA, 568 bp, Homo sapiens
acttatacccacttacaacttttcctaacatagtaagcatcactgtcatatatccattttctcaagacaaaaacctgcgcaagatccttgattattttctttttcttacccccttccctattcagtccatcagaaagtcccgttgaccatacccaaaaacatatctgaattcatcgtcttctgtccatcttcactacagcaccacctcagtccattaccaaaattttacctggacaactgcaaaaaactaatctcccttctattcctatccttttcaatctctttctgtagagaaggcagtaccatttaaaaagcatgattcagatctctgtggcaggaactgccggtttcccaactcaatctccattgtcccttttctcattagtaatagacagcgacattcttcagcttcccttgcaactggatatagtcatgtgagtaggttctgatcaatgggatgtaagaggaaatactgggtaggactyttagaagatcctttaaaagggaggggatatcctttcatgttttggcttcttttctccttctggcattaaacatgctggctgga
